(19) United States
(12) Patent Application Publication
(10) Pub. No.: US 2010/0112687 A1
(43) Pub. Date: May 6, 2010

(54) NUCLEIC ACID COMPOUNDS FOR INHIBITING ERBB FAMILY GENE EXPRESSION AND USES THEREOF

(75) Inventors: Steven C. Quay, Woodinville, WA (US); James McSwiggen, Boulder, CO (US); Narendra K. Vaish, Kirkland, WA (US); Mohammad Ahmadian, Bothell, WA (US)

Correspondence Address: NASTECH PHARMACEUTICAL COMPANY INC;MDRNA, Inc., 3830 MONTE VILLA PARKWAY, BOTHELL, WA, 98021-7266, US

(73) Assignee: MDRNA, INC., Bothell, WA (US)

(21) Appl. No.: 12/528,619

(22) PCT Filed: Feb. 28, 2008
(86) PCT No.: PCT/US08/55360

§ 371 Date: Aug. 25, 2009

Related U.S. Application Data
(60) Provisional application No. 60/934,940, filed on Mar. 2, 2007.
(60) Provisional application No. 60/934,930, filed on Mar. 16, 2007.
(60) Provisional application No. 60/934,946, filed on May 3, 2007.
(60) Provisional application No. 60/934,945, filed on May 10, 2007.
(60) Provisional application No. 60/934,935, filed on May 15, 2007.
(60) Provisional application No. 60/934,922, filed on May 17, 2007.
(60) Provisional application No. 60/932,970, filed on May 22, 2007.

(51) Int. Cl. C12N 5/071; C07H 21/02

(52) U.S. Cl. 435/366; 536/23.1

(57) ABSTRACT

The present disclosure provides meroduplex ribonucleic acid molecules (mdRNA) capable of decreasing or silencing one or more ERBB family gene expression. An mdRNA of this disclosure comprises at least three strands that combine to form at least two non-overlapping double-stranded regions separated by a nick or gap wherein one strand is complementary to one or more ERBB family mRNA. In addition, the meroduplex may have at least one uridine substituted with a 5-methyluridine and optionally other modifications or combinations thereof. Also provided are methods of decreasing expression of one or more ERBB family gene in a cell or in a subject to treat one or more ERBB family-related disease.

### CROSS-REFERENCE TO RELATED APPLICATIONS

[0001] The present application claims priority to U.S. Patent Application Nos. 60/934,940, filed Mar. 2, 2007; 60/934,930, filed Mar. 16, 2007; 60/934,945, filed May 10, 2007; 60/934,946, filed May 3, 2007; 60/934,935, filed May 15, 2007; 60/934,922, filed May 17, 2007; and 60/932,970, filed May 22, 2007, each of which is incorporated by reference in its entirety.

### TECHNICAL FIELD

[0002] The present disclosure relates generally to compounds for use in treating hyperproliferative or inflammatory disorders by gene silencing and, more specifically, to a nicked or gapped double-stranded RNA (dsRNA) comprising at least three strands that decreases expression of one or more ERBB family gene, and to uses of such dsRNA to treat or prevent hyperproliferative or inflammatory diseases associated with inappropriate expression of one or more ERBB family members. The dsRNA that decreases one or more ERBB family gene expression may optionally have at least one uridine substituted with a 5-methyluridine.

### BACKGROUND

[0003] RNA interference (RNAi) refers to the cellular process of sequence specific, post-transcriptional gene silencing in animals mediated by small inhibitory nucleic acid molecules, such as a double-stranded RNA (dsRNA) that is homologous to a portion of a targeted messenger RNA (Fire et al., Nature 391:806, 1998; Hamilton et al., Science 286:950, 1999). RNAi has been observed in a variety of organisms, including mammalians (Fire et al., Nature 391:806, 1998; Bahramian and Zarbl, Mol. Cell. Biol. 19:274, 1999; Wianny and Goetz, Nature Cell Biol. 2:70, 1999). RNAi can be induced by introducing an exogenous synthetic 21-nucleotide RNA duplex into cultured mammalian cells (Elbashir et al., Nature 411:494, 2001a).

[0004] The mechanism by which dsRNA mediates targeted gene-silencing can be described as involving two steps. The first step involves degradation of long dsRNAs by a ribonuclease III-like enzyme, referred to as Dicer, into short interfering RNAs (siRNAs) having from 21 to 23 nucleotides with double-stranded regions of about 19 base pairs and a two nucleotide, generally, overhang at each 3′-end (Berstein et al., Nature 409:363, 2001; Elbashir et al., Genes Dev. 15:188, 2001b; and Kim et al., Nature Biotech. 23:222, 2005). The second step of RNAi gene-silencing involves activation of a multi-component nuclease having one strand (guide or antisense strand) from the siRNA and an Argonaute protein to form an RNA-induced silencing complex (“RISC”) (Elbashir et al., Genes Dev. 15:188, 2001). Argonaute initially associates with a double-stranded siRNA and then endonucleolytically cleaves the non-incorporated strand (passenger or sense strand) to facilitate its release due to resulting thermodynamic instability of the cleaved duplex (Leuschner et al., EMBO 7:314, 2006). The guide strand in the activated RISC binds to a complementary target mRNA and cleaves the mRNA to promote gene silencing. Cleavage of the target RNA occurs in the middle of the target region that is complementary to the guide strand (Elbashir et al., 2001b).

[0005] The ErbB/HER gene family (erythroblastic leukemia viral (v-erb-b) oncogene homolog family, also know as human epidermal growth factor receptor or HER) encode cell surface localized receptor tyrosine kinases. There are four members of the ERbB family of receptor tyrosine kinases epidermal growth factor receptor (EGFR), ERBB2 (HER2/neu), ERBB3, and ERBB4. The ERbB family constitutes a signal transduction pathway known to regulate cell survival, proliferation, development and differentiation in mammalians (Riese and Stern, Bioessays 20:41, 1998; Oda et al., Mol. Syst. Biol. 10:1, 2005; Holbro et al., Exp. Cell Res. 284:99, 2003). This mechanism and the downstream effectors are linked with cell proliferation, angiogenesis, migration, and invasion (Holbro et al., 2003; Nair, Current Science 88:890, 2005; Monilola et al., EMBO 19:3159, 2000).

[0006] The ligand dependent and/or independent dysregulation of one or more of the ERBB family of tyrosine kinase receptors, either through their overexpression and/or mutation, have been implicated in the development of a variety of cancers. As such, the ERbB family is a major cause of morbidity and mortality throughout the world. For example, EGFR is overexpressed in 40% of gliomas, and overexpression of EGFR correlates to higher grade and reduced survival (Hsieh et al., Lung Cancer 29:151, 2000). Overexpression of ERBB2/HER2 is associated with 20-30% of breast cancers and is a marker for an aggressive cancer phenotype and a consequent poor prognosis. The formation of ERBB3/ERBB2 heterodimers stimulates cell proliferation and tumor growth (e.g., breast and colon cancer) and, in the case of oral squamous cell carcinoma, correlates with lymph node involvement and patient survival (Shintani et al., Cancer Lett. 95:79, 1995). ErbB4 was found to be expressed in childhood medullo-blastoma with ErbB2 (Gilbertson et al., Cancer Res. 57:3272, 1997) and significantly increased NRG1-induced activation of ERBB4 was found in patients with schizophrenia (Hahn et al., Nature Med. 12:824, 2006). Therapeutics being developed for some ERBB receptors (e.g., monoclonal antibodies against EGFR and HER2) have resulted in resistance and/or some severe side effects.

[0007] There continues to be a need for alternative effective therapeutic modalities useful for treating or preventing ERBB family-associated diseases or disorders in which reduced gene expression (gene silencing) of one or more ERBB family genes would be beneficial. The present disclosure meets such needs, and further provides other related advantages.

### SUMMARY

[0008] Briefly, the present disclosure provides nicked or gapped double-stranded RNA (dsRNA) comprising at least three strands that is suitable as a substrate for Dicer or as a RISC activator to modify expression of one or more erythroblastic leukemia viral oncogene homolog (ERBB) family messenger RNA (mRNA).

[0009] In one aspect, the instant disclosure provides a meroduplex mdRNA molecule, comprising a first strand that is complementary to a human epidermal growth factor receptor (EGFR) mRNA as set forth in SEQ ID NO:1158, 1159, 1160, or 1161 (i.e., EGFR variant 1, 2, 3, or 4) and is fully complementary, with up to three mismatches, to at least one other human ERBB family mRNA selected from SEQ ID NO:1162, 1163, 1164, 1165, or 1166 (i.e., ERBB2 variant 1, ERBB2 variant 2, ERBB3 variant 1, ERBB3 variant s, ERBB4, respectively), and a second strand and a third strand that are each complementary to non-overlapping regions of the first strand, wherein the second strand and third strands can anneal with the first strand to form at least two double-stranded regions spaced apart by up to 10 nucleotides and thereby forming a gap between the second and third strands, and wherein (a) the mdRNA molecule optionally includes at least one double-stranded region of 5 base pairs to 13 base pairs, or (b) the double-stranded regions combined total about 15 base pairs to about 40 base pairs and the mdRNA molecule optionally has blunt ends. In certain embodiments, the first strand is about 15 to about 40 nucleotides in length, and the second and third strands are each, individually, about 5 to about 20 nucleotides, wherein the combined length of the second and third strands is about 15 nucleotides to about 40 nucleotides. In other embodiments, the first strand is about 15 to about 40 nucleotides in length and is complementary to at least about 15, 16, 17, 18, 19, 20, 21, 22, 23, 24, 25, 26, 27, 28, 29, 30, 31, 32, 33, 34, 35, 36, 37, 38, 39, or 40 contiguous nucleotides of a human ERBB family mRNA as set forth in at least two of SEQ ID NOS:1158-1166. In still further embodiments, the first strand is about 15 to about 40 nucleotides in length and is at least about 70%, 75%, 80%, 85%, 90%, 95%, 96%, 97%, 98%, or 99% identical to a sequence that is complementary to at least about 15, 16, 17, 18, 19, 20, 21, 22, 23, 24, 25, 26, 27, 28, 29, 30, 31, 32, 33, 34, 35, 36, 37, 38, 39, or 40 contiguous nucleotides of a human ERBB family mRNA as set forth in at least two of SEQ ID NOS:1158-1166.

[0010] In other embodiments, the mdRNA is a RISC activator (e.g., the first strand has about 15 nucleotides to about 24 or 25 nucleotides) or a Dicer substrate (e.g., the first strand has about 25 or 26 nucleotides to about 40 nucleotides). In some embodiments, the gap comprises at least one unpaired nucleotide in the first strand positioned between the double-stranded regions formed by the second and third strands when annealed to the first strand, or the gap is a nick. In certain embodiments, the nick or gap is located between nucleotides 9 and 10 from the 5′-end of the second (a portion of the sense) strand or at the Argonaute cleavage site or within 10 nucleotides of the Argonaute cleavage site.

[0011] In another aspect, the instant disclosure provides an mdRNA molecule having a first strand that is complementary to a human EGFR mRNA as set forth in SEQ ID NO:1158, 1159, 1160, or 1161 and is fully complementary, with up to three mismatches, to at least one other human ERBB family mRNA selected from SEQ ID NO:1162, 1163, 1164, 1165, or 1166, and a second strand and a third strand that is each complementary to non-overlapping regions of the first strand, wherein the second strand and third strands can anneal with the first strand to form at least two double-stranded regions spaced apart by up to 10 nucleotides and thereby forming a gap between the second and third strands, and wherein (a) the mdRNA molecule optionally includes at least one double-stranded region of 5 base pairs to 13 base pairs, or (b) the double-stranded regions combined total about 15 base pairs to about 40 base pairs and the mdRNA molecule optionally has blunt ends; and wherein at least one pyrimidine of the mdRNA comprises a pyrimidine nucleoside according to Formula I or II:

[chemical structure]

wherein R¹ and R² are each independently a —H, —OH, —OCH₃, —OCH₂OCH₂CH₃, —OCH₂CH₂OCH₃, halogen, substituted or unsubstituted C₁-C₁₀ alkyl, alkoxy, alkoxyalkyl, hydroxyalkyl, carboxyalkyl, alkylsulfonylamino, aminoalkyl, dialkylamino, alkylaminoalkyl, dialkylaminoalkyl, haloalkyl, trifluoromethyl, cycloalkyl, (cycloalkyl)alkyl, substituted or unsubstituted C₂-C₁₀ alkenyl, substituted or unsubstituted —O-allyl, O—CH₂CH═CH₂, —O—CH═CHCH₃, substituted or unsubstituted C₂-C₁₀ alkynyl, carbamoyl, carbamyl, carboxy, carbonylamino, substituted or unsubstituted aryl, substituted or unsubstituted aralkyl, —NH₂, —NO₂, —CN, or heterocyclo group; R³ and R⁴ are each independently a hydroxyl, a protected hydroxyl, a phosphate, or an internucleoside linking group; and R⁵ is O or S. In certain embodiments, at least one nucleoside is according to Formula I and in which R¹ is methyl and R² is —OH. In certain related embodiments, at least one uridine of the dsRNA molecule is replaced with a nucleoside according to Formula I in which R¹ is methyl and R² is —OH. In some embodiments, the at least one R¹ is a C₁-C₅ alkyl, such as methyl. In some embodiments, at least one R² is selected from 2′-O—(C₁-C₅) alkyl, 2′-O-methyl, 2′-OCH₂OCH₂CH₃, 2′-OCH₂CH₂OCH₃, 2′-O-allyl, or fluoro. In some embodiments, at least one pyrimidine nucleoside of the mdRNA molecule is a locked nucleic acid (LNA) in the form of a bicyclic sugar, wherein R² is oxygen, and the 2′-O and 4′-C form an oxymethylene bridge on the same ribose ring, such as a 5-methyluridine LNA. In other embodiments, one or more of the nucleosides are according to Formula I in which R¹ is methyl and R² is a 2′-O—(C₁-C₅) alkyl, such as 2′-O-methyl. In some embodiments, the gap comprises at least one unpaired nucleotide in the first strand positioned between the double-stranded regions formed by the second and third strands when annealed to the first strand, or the gap is a nick. In certain embodiments, the nick or gap is located between nucleotides 9 and 10 from the 5′-end of the second (a portion of the sense) strand or at the Argonaute cleavage site or within 10 nucleotides of the Argonaute cleavage site.

[0012] In still another aspect, the instant disclosure provides a method for reducing the expression of one or more human ERBB family gene in a cell, comprising administering an mdRNA molecule to a cell expressing one or more ERBB family gene, wherein the mdRNA molecule is capable of specifically binding to one or more ERBB family mRNA and thereby reducing expression of one or more ERBB genes in the cell. In a related aspect, there is provided a method of treating or preventing a disease associated with ERBB family expression in a subject by administering an mdRNA molecule of this disclosure. In certain embodiments, the cell or subject is human. In certain embodiments, the disease is a hyperproliferative disease, such as cancer, or an inflammatory disorder, such as arthritis.

[0013] In any of the aspects of this disclosure, some embodiments provide mdRNA molecule having a 5-methyluridine (ribothymidine) in place of at least one uridine on the first, second, or third strand, or in place of each and every uridine on the first, second, or third strand. In further embodiments, the mdRNA further comprises one or more non-standard nucleoside, such as a deoxyuridine, locked nucleic acid (LNA) molecule, such as a 5-methyluridine LNA, a universal-binding nucleotide, or any combination thereof. Exemplary universal-binding nucleotides include C-phenyl, C-naphthyl, inosine, azole carboxamide, 1-β-D-ribofuranosyl-4-nitroindole, 1-β-D-ribofuranosyl-5-nitroindole, 1-β-D-ribofuranosyl-6-nitroindole, or 1-β-D-ribofuranosyl-3-nitropyrrole. In some embodiments, the mdRNA molecule further comprises a 2′-sugar substitution, such as a 2′-O-methyl, 2′-O-methoxyethyl, 2′-O-2-methoxyethyl, 2′-O-allyl, or halogen (e.g., 2′-fluoro). In certain embodiments, the mdRNA molecule further comprises a terminal cap substituent on one or both ends of the first strand, second strand, or third strand, such as independently an alkyl, abasic, deoxy abasic, glyceryl, dinucleotide, acyclic nucleotide, or inverted deoxynucleotide moiety. In other embodiments, the mdRNA molecule further comprises at least one modified internucleoside linkage, such as independently a phosphorothioate, chiral phosphorothioate, phosphorodithioate, phosphotriester, aminoalkylphosphotriester, methyl phosphonate, alkyl phosphonate, 3′-alkylene phosphonate, 5′-alkylene phosphonate, chiral phosphonate, phosphonoacetate, thiophosphonoacetate, phosphinate, phosphoramidate, 3′-amino phosphoramidate, aminoalkylphosphoramidate, thionophosphoramidate, thionoalkylphosphonate, thionoalkylphosphotriester, selenophosphate, or boranophosphate linkage.

[0014] In any of the aspects of this disclosure, some embodiments provide an mdRNA comprising an overhang of one to four nucleotides on at least one 3′-end that is not part of the gap, such as at least one deoxyribonucleotide or two deoxyribonucleotides (e.g., thymidine). In some embodiments, at least one or two 5′-terminal ribonucleotide of the second strand within the double-stranded region comprises a 2′-sugar substitution. In related embodiments, at least one or two 5′-terminal ribonucleotide of the first strand within the double-stranded region comprises a 2′-sugar substitution. In other related embodiments, at least one or two 5′-terminal ribonucleotide of the second strand and at least one or two 5′-terminal ribonucleotide of the first strand within the double-stranded regions comprise independent 2′-sugar substitutions. In other embodiments, the mdRNA molecule comprises at least three 5-methyluridines within at least one double-stranded region. In some embodiments, the mdRNA molecule has a blunt end at one or both ends. In other embodiments, the 5′-terminal of the third strand is a hydroxyl or a phosphate.

### BRIEF DESCRIPTION OF THE DRAWINGS

[0015] FIG. 1 shows the gene silencing activity of ten different EGFR-specific nicked and gapped dsRNA Dicer substrates. This is the graphical representation of the data found in Table 1 (the Complex numbers on the x-axis correspond to the Set numbers for each of the ten different EGFR dsRNAs shown in Table 1).

[0016] FIG. 2 shows knockdown activity for RISC activator lacZ dsRNA (21 nucleotide sense strand/21 nucleotide antisense strand; 21/21), Dicer substrate lacZ dsRNA (25 nucleotide sense strand/27 nucleotide antisense strand; 25/27), and meroduplex lacZ mdRNA (13 nucleotide sense strand and 11 nucleotide sense strand/27 nucleotide antisense strand; 13, 11/27—the sense strand is missing one nucleotide so that a single nucleotide gap is left between the 13 nucleotide and 11 nucleotide sense strands when annealed to the 27 nucleotide antisense strand. Knockdown activities were normalized to a Qneg control dsRNA and presented as a normalized value of Qneg (i.e., Qneg represents 100% or “normal” gene expression levels). A smaller value indicates a greater knockdown effect.

[0017] FIG. 3 shows knockdown activity of a RISC activator influenza dsRNA G1498 (21/21) and nicked dsRNA (10, 11/21) at 100 nM. The “wt” designation indicates an unsubstituted RNA molecule; “rT” indicates RNA having each uridine substituted with a ribothymidine; and “p” indicates that the 5′-nucleotide of that strand was phosphorylated. The 21 nucleotide sense and antisense strands of G1498 were individually nicked between the nucleotides 10 and 11 as measured from the 5′-end, and is referred to as 11, 10/21 and 21/10, 11, respectively. The G1498 single stranded 21 nucleotide antisense strand alone (designated AS-only) was used as a control.

[0018] FIG. 4 shows knockdown activity of a lacZ dicer substrate (25/27) having a nick in one of each of positions 8 to 14 and a one nucleotide gap at position 13 of the sense strand (counted from the 5′-end). A dideoxy guanosine (ddG) was incorporated at the 5′-end of the 3′-most strand of the nicked or gapped sense sequence at position 13.

[0019] FIG. 5 shows knockdown activity of a dicer substrate influenza dsRNA G1498DS (25/27) and this sequence nicked at one of each of positions 8 to 14 of the sense strand, and shows the activity of these nicked molecules that are also phosphorylated or have a locked nucleic acid substitution.

[0020] FIG. 6 shows a dose dependent knockdown activity a dicer substrate influenza dsRNA G1498DS (25/27) and this sequence nicked at position 13 of the sense strand.

[0021] FIG. 7 shows knockdown activity of a dicer substrate influenza dsRNA G1498DS having a nick or a gap of one to six nucleotides that begins at any one of positions 8 to 12 of the sense strand.

[0022] FIG. 8 shows knockdown activity of a LacZ RISC dsRNA having a nick or a gap of one to six nucleotides that begins at any one of positions 8 to 14 of the sense strand.

[0023] FIG. 9 shows knockdown activity of an influenza RISC dsRNA having a nick at any one of positions 8 to 14 of the sense strand and further having one or two locked nucleic acids (LNA) per sense strand. The inserts on the right side of the graph provides a graphic depiction of the meroduplex structures (for clarity, a single antisense strand is shown at the bottom of the grouping with each of the different nicked sense strands above the antisense) having different nick positions with the relative positioning of the LNAs on the sense strands.

[0024] FIG. 10 shows knockdown activity of a LacZ dicer substrate dsRNA having a nick at any one of positions 8 to 14 of the sense strand as compared to the same nicked dicer substrates but having a locked nucleic acid substitution.

[0025] FIG. 11 shows the percent knockdown in influenza viral titers using influenza specific mdRNA against influenza strain WSN.

[0026] FIG. 12 shows the in vivo reduction in PR8 influenza viral titers using influenza specific mdRNA as measured by TCID₅₀.

### DETAILED DESCRIPTION

[0027] The instant disclosure is predicated upon the unexpected discovery that a nicked or gapped double-stranded RNA (dsRNA) comprising at least three strands is a suitable substrate for Dicer or RISC and, therefore, may be advantageously employed for gene silencing via, for example, the RNA interference pathway. That is, partially duplexed dsRNA molecules described herein (also referred to as meroduplexes having a nick or gap in at least one strand) are capable of initiating an RNA interference cascade that modifies (e.g., reduces) expression of a target messenger RNA (mRNA) or a family of related mRNAs, such as an erythroblastic leukemia viral oncogene homolog (e.g., EGFR, also known as ERBB1) mRNA or a family of ERBB mRNAs (including, for example, ERBB1, ERBB2, ERBB3, ERBB4). This is surprising because the thermodynamically less stable nicked or gapped dsRNA passenger strand (as compared to an intact dsRNA) would be expected to fall apart before any gene silencing effect would result (Leuschner et al., EMBO 7:314, 2006).

[0028] Exemplary meroduplex ribonucleic acid (mdRNA) molecules described herein include a first (antisense) strand that is complementary to a human erythroblastic leukemia viral oncogene homolog (ERBB) mRNA as set forth in SEQ ID NO:1158, 1159, 1160, or 1161 (i.e., EGFR variant 1, 2, 3, or 4) and is fully complementary, with up to three mismatches, to at least one other human ERBB family mRNA selected from SEQ ID NO:1162, 1163, 1164, 1165, or 1166 (i.e., ERBB2 variant 1, ERBB2 variant 2, ERBB3 variant 1, ERBB3 variant s, ERBB4, respectively), along with second and third strands (together forming a gapped sense strand) that are each complementary to non-overlapping regions of the first strand, wherein the second and third strands can anneal with the first strand to form at least two double-stranded regions separated by a gap, and wherein at least one double-stranded region is from about 5 base pairs to 13 base pairs, or the combined double-stranded regions total about 15 base pairs to about 40 base pairs and the mdRNA is blunt-ended.

[0029] The gap can be from zero nucleotides (i.e., a nick in which only a phosphodiester bond between two nucleotides is broken in a polynucleotide molecule) up to about 10 nucleotides (i.e., the first strand will have at least one internal unpaired nucleotide). In certain embodiments, the nick or gap is located between nucleotides 9 and 10 from the 5′-end of the second (a portion of the sense) strand or is at the Argonaute cleavage site. In another embodiment, the nick or gap is located in a position wherein each of the two or more nicked or gapped strands has a maximal melting temperature (i.e., Tₘ or temperature at which 50% of one of the nicked or gapped strands is annealed to the first strand). Also provided herein are methods of using such dsRNA to reduce expression of an ERBB gene or one or more gene of the ERBB family in a cell or to treat or prevent diseases or disorders associated with ERBB gene expression or expression of one or more ERBB gene family members, including hyperproliferative disorders (e.g., cancer) or inflammatory conditions (e.g., arthritis).

[0030] Prior to introducing more detail to this disclosure, it may be helpful to an appreciation thereof to provide definitions of certain terms to be used herein.

[0031] In the present description, any concentration range, percentage range, ratio range, or integer range is to be understood to include the value of any integer within the recited range and, when appropriate, fractions thereof (such as one tenth and one hundredth of an integer), unless otherwise indicated. Also, any number range recited herein relating to any physical feature, such as polymer subunits, size or thickness, are to be understood to include any integer within the recited range, unless otherwise indicated. As used herein, “about” or “consisting essentially of” mean±20% of the indicated range, value, or structure, unless otherwise indicated. As used herein, the terms “include” and “comprise” are open ended and are used synonymously. It should be understood that the terms “a” and “an” as used herein refer to “one or more” of the enumerated components. The use of the alternative (e.g., “or”) should be understood to mean either one, both, or any combination thereof of the alternatives.

[0032] As used herein, “complementary” refers to a nucleic acid molecule that can form hydrogen bond(s) with another nucleic acid molecule or itself by either traditional Watson-Crick base pairing or other non-traditional types of pairing (e.g., Hoogsteen or reversed Hoogsteen hydrogen bonding) between complementary nucleosides or nucleotides. In reference to the nucleic molecules of the present disclosure, the binding free energy for a nucleic acid molecule with its complementary sequence is sufficient to allow the relevant function of the nucleic acid molecule to proceed, for example, RNAi activity, and there is a sufficient degree of complementarity to avoid non-specific binding of the nucleic acid molecule (e.g., dsRNA) to non-target sequences under conditions in which specific binding is desired, i.e., under physiological conditions in the case of in vivo assays or therapeutic treatment, or under conditions in which the assays are performed in the case of in vitro assays (e.g., hybridization assays). Determination of binding free energies for nucleic acid molecules is well known in the art (see, e.g., Turner et al., CSH Symp. Quant. Biol. LII: 123, 1987; Frier et al., Proc. Nat'l. Acad. Sci. USA 83:9373, 1986; Turner et al., J. Am. Chem. Soc. 109:3783, 1987). Thus, “complementary” or “specifically hybridizable” or “specifically binds” are terms that indicate a sufficient degree of complementarity or precise pairing such that stable and specific binding occurs between a nucleic acid molecule (e.g., dsRNA) and a DNA or RNA target. It is understood in the art that a nucleic acid molecule need not be 100% complementary to a target nucleic acid sequence to be specifically hybridizable or to specifically bind. That is, two or more nucleic acid molecules may be less than fully complementary and is indicated by a percentage of contiguous residues in a nucleic acid molecule that can form hydrogen bonds with a second nucleic acid molecule.

[0033] For example, a first nucleic acid molecule may have 10 nucleotides and a second nucleic acid molecule may have 10 nucleotides, then base pairing of 5, 6, 7, 8, 9, or 10 nucleotides between the first and second nucleic acid molecules, which may or may not form a contiguous double-stranded region, represents 50%, 60%, 70%, 80%, 90%, and 100% complementarity, respectively. In certain embodiments, complementary nucleic acid molecules may have wrongly paired bases—that is, bases that cannot form a traditional Watson-Crick base pair or other non-traditional types of pair (i.e., “mismatched” bases). For instance, complementary nucleic acid molecules may be identified as having a certain number of “mismatches,” such as zero or about 1, about 2, about 3, about 4 or about 5.

[0034] “Perfectly” or “fully” complementary nucleic acid molecules means those in which a certain number of nucleotides of a first nucleic acid molecule hydrogen bond (anneal) with the same number of residues in a second nucleic acid molecule to form a contiguous double-stranded region. For example, two or more fully complementary nucleic acid molecule strands can have the same number of nucleotides (i.e., have the same length and form one double-stranded region, with or without an overhang) or have a different number of nucleotides (e.g., one strand may be shorter than but fully contained within a second strand or one strand may overhang the second strand).

[0035] By “ribonucleic acid” or “RNA” is meant a nucleic acid molecule comprising at least one ribonucleotide molecule. As used herein, “ribonucleotide” refers to a nucleotide with a hydroxyl group at the 2′-position of a β-D-ribofuranose moiety. The term RNA includes double-stranded (ds) RNA, single-stranded (ss) RNA, isolated RNA (such as partially purified RNA, essentially pure RNA, synthetic RNA, recombinantly produced RNA), altered RNA (which differs from naturally occurring RNA by the addition, deletion, substitution or alteration of one or more nucleotides), or any combination thereof. For example, such altered RNA can include addition of non-nucleotide material, such as at one or both ends of an RNA molecule, internally at one or more nucleotides of the RNA, or any combination thereof. Nucleotides in RNA molecules of the instant disclosure can also comprise non-standard nucleotides, such as naturally occurring nucleotides, non-naturally occurring nucleotides, chemically-modified nucleotides, deoxynucleotides, or any combination thereof. These altered RNAs may be referred to as analogs or analogs of RNA containing standard nucleotides (i.e., standard nucleotides, as used herein, are considered to be adenine, cytidine, guanidine, thymidine, and uridine).

[0036] The term “dsRNA” as used herein, which is interchangeable with “mdRNA,” refers to any nucleic acid molecule comprising at least one ribonucleotide molecule and capable of inhibiting or down regulating gene expression, for example, by promoting RNA interference (“RNAi”) or gene silencing in a sequence-specific manner. The dsRNAs (mdRNAs) of the instant disclosure may be suitable substrates for Dicer or for association with RISC to mediate gene silencing by RNAi. Examples of dsRNA molecules of this disclosure are shown in Table A herein. One or both strands of the dsRNA can further comprise a terminal phosphate group, such as a 5′-phosphate or 5′,3′-diphosphate. As used herein, dsRNA molecules, in addition to at least one ribonucleotide, can further include substitutions, chemically-modified nucleotides, and non-nucleotides. In certain embodiments, dsRNA molecules comprise ribonucleotides up to about 100% of the nucleotide positions.

[0037] In addition, as used herein, the term dsRNA is meant to be equivalent to other terms used to describe nucleic acid molecules that are capable of mediating sequence specific RNAi, for example, meroduplex RNA (mdRNA), nicked dsRNA (ndsRNA), gapped dsRNA (gdsRNA), short interfering nucleic acid (siNA), siRNA, micro-RNA (miRNA), short hairpin RNA (shRNA), short interfering oligonucleotide, short interfering substituted oligonucleotide, short interfering modified oligonucleotide, chemically-modified dsRNA, post-transcriptional gene silencing RNA (ptgsRNA), or the like. The term “large double-stranded (ds) RNA” refers to any dsRNA longer than about 40 by to about 100 by or more, particularly up to about 300 by to about 500 bp. The sequence of a large dsRNA may represent a segment of an mRNA or an entire mRNA. A double-stranded structure may be formed by self-complementary nucleic acid molecule or by annealing of two or more distinct complementary nucleic acid molecule strands.

[0038] In one aspect, a dsRNA comprises two separate oligonucleotides, comprising a first strand (antisense) and a second strand (sense), wherein the antisense and sense strands are self-complementary (i.e., each strand comprises a nucleotide sequence that is complementary to a nucleotide sequence in the other strand and the two separate strands form a duplex or double-stranded structure, for example, wherein the double-stranded region is about 15 to about 24 or 25 base pairs or about 25 or 26 to about 40 base pairs); the antisense strand comprises a nucleotide sequence that is complementary to a nucleotide sequence in a target nucleic acid molecule or a portion thereof (e.g., a human ERBB mRNA of SEQ ID NO:1158, 1159, 1160, 1161, 1162, 1163, 1164, 1165, 1166, or any combination thereof); and the sense strand comprises a nucleotide sequence corresponding (i.e., homologous) to the target nucleic acid sequence or a portion thereof (e.g., a sense strand of about 15 to about 25 nucleotides or about 26 to about 40 nucleotides corresponds to the target nucleic acid or a portion thereof).

[0039] In another aspect, the dsRNA is assembled from a single oligonucleotide in which the self-complementary sense and antisense strands of the dsRNA are linked by together by a nucleic acid based-linker or a non-nucleic acid-based linker. In certain embodiments, the first (antisense) and second (sense) strands of the dsRNA molecule are covalently linked by a nucleotide or non-nucleotide linker as described herein and known in the art. In other embodiments, a first dsRNA molecule is covalently linked to at least one second dsRNA molecule by a nucleotide or non-nucleotide linker known in the art, wherein the first dsRNA molecule can be linked to a plurality of other dsRNA molecules that can be the same or different, or any combination thereof. In another embodiment, the linked dsRNA may include a third strand that forms a meroduplex with the linked dsRNA.

[0040] In still another aspect, dsRNA molecules described herein form a meroduplex RNA (mdRNA) having three or more strands such as, for example, an ‘A’ (first or antisense) strand, ‘S1’ (second) strand, and ‘S2’ (third) strand in which the ‘S1’ and ‘S2’ strands are complementary to and form base pairs (bp) with non-overlapping regions of the ‘A’ strand (e.g., an mdRNA can have the form of A:S1S2). The double-stranded region formed by the annealing of the ‘S1’ and ‘A’ strands is distinct from and non-overlapping with the double-stranded region formed by the annealing of the ‘S2’ and ‘A’ strands. An mdRNA molecule is a “gapped” molecule, i.e., it contains a “gap” ranging from 0 nucleotides up to about 10 nucleotides (or a gap of 11, 12, 13, 14, 15, 16, 17, 18, 19, 20, 21, 22, 23, 24, 25, 26, 27, 28, 29, 30, 31, 32, 33, 34 or 35 nucleotides). In one embodiment, the A:S1 duplex is separated from the A:S2 duplex by a gap resulting from at least one unpaired nucleotide (up to about 10 unpaired nucleotides) in the ‘A’ strand that is positioned between the A:S1 duplex and the A:S2 duplex and that is distinct from any one or more unpaired nucleotide at the 3′-end of one or more of the ‘A’, ‘S1’, or ‘S2’ strands. In another embodiment, the A:S1 duplex is separated from the A:S2 duplex by a gap of zero nucleotides (i.e., a nick in which only a phosphodiester bond between two nucleotides is broken or missing in the polynucleotide molecule) between the A:S1 duplex and the A:S2 duplex—which can also be referred to as nicked dsRNA (ndsRNA). For example, A:S1S2 may be comprised of a dsRNA having at least two double-stranded regions that combined total about 14 base pairs to about 40 base pairs and the double-stranded regions are separated by a gap of 0, 1, 2, 3, 4, 5, 6, 7, 8, 9, 10, 11, 12, 13, 14, 15, 16, 17, 18, 19, 20, 21, 22, 23, 24, 25, 26, 27, 28, 29, 30, 31, 32, 33, 34 or 35 nucleotides, optionally having blunt ends, or A:S1S2 may comprise a dsRNA having at least two double-stranded regions spaced apart by up to 10 nucleotides and thereby forming a gap between the second and third strands wherein at least one of the double-stranded regions optionally has from 5 base pairs to 13 base pairs.

[0041] In addition, as used herein, the term “RNAi” is meant to be equivalent to other terms used to describe sequence specific RNA interference, such as post transcriptional gene silencing, translational inhibition, or epigenetics. For example, dsRNA molecules of this disclosure can be used to epigenetically silence genes at the post-transcriptional level or the pre-transcriptional level or any combination thereof.

[0042] As used herein, “target nucleic acid” refers to any nucleic acid sequence whose expression or activity is to be altered (e.g., an ERBB). The target nucleic acid can be DNA, RNA, or analogs thereof, and includes single, double, and multi-stranded forms. By “target site” or “target sequence” is meant a sequence within a target nucleic acid (e.g., mRNA) that is “targeted” for cleavage by RNAi and mediated by a dsRNA construct of this disclosure containing a sequence within the antisense strand that is complementary to the target site or sequence.

[0043] As used herein, “off-target effect” or “off-target profile” refers to the observed altered expression pattern of one or more genes in a cell or other biological sample not targeted, directly or indirectly, for gene silencing by an mdRNA or dsRNA. For example, an off-target effect can be quantified by using a DNA microarray to determine how many non-target genes have an expression level altered by about 2-fold or more in the presence of a candidate mdRNA or dsRNA, or analog thereof specific for a target sequence, such as one or more ERBB family mRNA. A “minimal off-target effect” means that an mdRNA or dsRNA affects expression by about 2-fold or more of about 25% to about 1% of the non-target genes examined or it means that the off-target effect of substituted or modified mdRNA or dsRNA (e.g., having at least one uridine substituted with a 5-methyluridine and optionally having at least one nucleotide modified at the 2′-position), is reduced by at least about 1% to about 80% or more as compared to the effect on non-target genes of an unsubstituted or unmodified mdRNA or dsRNA.

[0044] By “sense region” or “sense strand” is meant one or more nucleotide sequences of a dsRNA molecule having complementarity to one or more antisense regions of the dsRNA molecule. In addition, the sense region of a dsRNA molecule comprises a nucleic acid sequence having homology or identity to a target sequence, such as an ERBB sequence. By “antisense region” or “antisense strand” is meant a nucleotide sequence of a dsRNA molecule having complementarity to a target nucleic acid sequence, such as an ERBB sequence. In addition, the antisense region of a dsRNA molecule can comprise a nucleic acid sequence regions having complementarity to one or more sense strands of the dsRNA molecule.

[0045] “Analog” as used herein refers to a compound that is structurally similar to a parent compound (e.g., a nucleic acid molecule), but differs slightly in composition (e.g., one atom or functional group is different, added, or removed). The analog may or may not have different chemical or physical properties than the original compound and may or may not have improved biological or chemical activity. For example, the analog may be more hydrophilic or it may have altered activity as compared to a parent compound. The analog may mimic the chemical or biological activity of the parent compound (i.e., it may have similar or identical activity), or, in some cases, may have increased or decreased activity. The analog may be a naturally or non-naturally occurring (e.g., chemically-modified or recombinant) variant of the original compound. An example of an RNA analog is an RNA molecule having a non-standard nucleotide, such as 5-methyuridine or 5-methylcytidine, which may impart certain desirable properties (e.g., improve stability, bioavailability, minimize off-target effects or interferon response).

[0046] As used herein, the term “universal base” refers to nucleotide base analogs that form base pairs with each of the standard DNA/RNA bases with little discrimination between them. A universal base is thus interchangeable with all of the standard bases when substituted into a nucleotide duplex (see, e.g., Loakes et al., J. Mol. Bio. 270:426, 1997). Exemplary universal bases include C-phenyl, C-naphthyl and other aromatic derivatives, inosine, azole carboxamides, or nitroazole derivatives such as 3-nitropyrrole, 4-nitroindole, 5-nitroindole, and 6-nitroindole (see, e.g., Loakes, Nucleic Acids Res. 29:2437, 2001).

[0047] The term “gene” as used herein, especially in the context of “target gene” or “gene target” for RNAi, means a nucleic acid molecule that encodes an RNA, including messenger RNA (mRNA, also referred to as structural genes that encode for a polypeptide), a functional RNA (fRNA), or non-coding RNA (ncRNA), such as small temporal RNA (stRNA), microRNA (miRNA), small nuclear RNA (snRNA), short interfering RNA (siRNA), small nucleolar RNA (snRNA), ribosomal RNA (rRNA), transfer RNA (tRNA) and precursor RNAs thereof. Such non-coding RNAs can serve as target nucleic acid molecules for dsRNA mediated RNAi to alter the activity of fRNA or ncRNA involved in functional or regulatory cellular processes. A target gene can be a gene derived from a cell, such as an endogenous gene, a transgene, or exogenous gene, including genes from a pathogen (e.g., a viral gene) that is present in a cell after infection thereof. A cell containing a target gene (e.g., an ERBB) can be derived from or contained in any organism, for example, a plant, animal, protozoan, virus, bacterium, or fungus.

[0048] As used herein, “gene silencing” refers to a partial or complete loss-of-function through targeted inhibition of gene expression in a cell, which may also be referred to as RNAi “knockdown,” “inhibition,” “down-regulation,” or “reduction” of expression of a target gene, such as a human ERBB gene. Depending on the circumstances and the biological problem to be addressed, it may be preferable to partially reduce gene expression. Alternatively, it might be desirable to reduce gene expression as much as possible. The extent of silencing may be determined by methods described herein and as known in the art, some of which are summarized in PCT Publication No. WO 99/32619. Depending on the assay, quantification of gene expression permits detection of various amounts of inhibition that may be desired in certain embodiments of this disclosure, including prophylactic and therapeutic methods, which will be capable of knocking down target gene expression, in terms of mRNA level or protein level or activity, for example, by equal to or greater than 10%, 30%, 50%, 75% 90%, 95% or 99% of baseline (i.e., normal) or other control levels, including elevated expression levels as may be associated with particular disease states or other conditions targeted for therapy.

[0049] As used herein, the term “therapeutically effective amount” means an amount of dsRNA that is sufficient to result in a decrease in severity of disease symptoms, an increase in frequency or duration of disease symptom-free periods, or a prevention of impairment or disability due to the disease, in the subject (e.g., human) to which it is administered. For example, a therapeutically effective amount of dsRNA directed against an mRNA of an ERBB (e.g., SEQ ID NO:1158, 1159, 1160, 1161, 1162, 1163, 1164, 1165, 1166, or any combination thereof) can inhibit cell growth or hyperproliferative (e.g., neoplastic) cell growth by at least about 20%, at least about 40%, at least about 60%, or at least about 80% relative to untreated subjects. A therapeutically effective amount of a therapeutic compound can decrease, for example, tumor size or otherwise ameliorate symptoms in a subject. One of ordinary skill in the art would be able to determine such therapeutically effective amounts based on such factors as the subject's size, the severity of symptoms, and the particular composition or route of administration selected. The nucleic acid molecules of the instant disclosure, individually, or in combination or in conjunction with other drugs, can be used to treat diseases or conditions discussed herein. For example, to treat a particular disease, disorder, or condition, the dsRNA molecules can be administered to a patient or can be administered to other appropriate cells evident to those skilled in the art, individually or in combination with one or more drugs, under conditions suitable for treatment.

[0050] Also, one or more dsRNA may be used to knockdown expression of an ERBB family mRNA as set forth in any one or more of SEQ ID NO:1158-1166, or a related mRNA splice variant. In this regard it is noted that an ERBB family gene may be transcribed into two or more mRNA splice variants; and thus, for example, in certain embodiments, knockdown of one mRNA splice variant without affecting the other mRNA splice variant may be desired, or vice versa; or knockdown of all transcription products may be targeted.

[0051] In addition, it should be understood that the individual compounds, or groups of compounds, derived from the various combinations of the structures and substituents described herein, are disclosed by the present application to the same extent as if each compound or group of compounds was set forth individually. Thus, selection of particular structures or particular substituents is within the scope of the present disclosure. As described herein, all value ranges are inclusive over the indicated range. Thus, a range of C₁-C₄ will be understood to include the values of 1, 2, 3, and 4, such that C₁, C₂, C₃ and C₄ are included.

[0052] The term “alkyl” as used herein refers to saturated straight- or branched-chain aliphatic groups containing from 1-20 carbon atoms, preferably 1-8 carbon atoms and most preferably 1-4 carbon atoms. This definition applies as well to the alkyl portion of alkoxy, alkanoyl and aralkyl groups. The alkyl group may be substituted or unsubstituted. In certain embodiments, the alkyl is a (C₁-C₄) alkyl or methyl.

[0053] The term “cycloalkyl” as used herein refers to a saturated cyclic hydrocarbon ring system containing from 3 to 12 carbon atoms that may be optionally substituted. Exemplary embodiments include, but are not limited to, cyclopropyl, cyclobutyl, cyclopentyl and cyclohexyl. In certain embodiments, the cycloalkyl group is cyclopropyl. In another embodiment, the (cycloalkyl)alkyl groups contain from 3 to 12 carbon atoms in the cyclic portion and 1 to 6 carbon atoms in the alkyl portion. In certain embodiments, the (cycloalkyl)alkyl group is cyclopropylmethyl. The alkyl groups are optionally substituted with from one to three substituents selected from the group consisting of halogen, hydroxy and amino.

[0054] The terms “alkanoyl” and “alkanoyloxy” as used herein refer, respectively, to —C(O)-alkyl groups and O—C(═O)— alkyl groups, each optionally containing 2 to 10 carbon atoms. Specific embodiments of alkanoyl and alkanoyloxy groups are acetyl and acetoxy, respectively.

[0055] The term “alkenyl” refers to an unsaturated branched, straight-chain or cyclic alkyl group having 2 to 15 carbon atoms and having at least one carbon-carbon double bond derived by the removal of one hydrogen atom from a single carbon atom of a parent alkene. The group may be in either the cis or trans conformation about the double bond(s). Certain embodiments include ethenyl, 1-propenyl, 2-propenyl, 1-methylethenyl, 1-butenyl, 2-butenyl, 3-butenyl, 2-methyl-2-propenyl, 1-pentenyl, 2-pentenyl, 4-pentenyl, 3-methyl-2-butenyl, 1-hexenyl, 2-hexenyl, 1-heptenyl, 2-heptenyl, 1-octenyl, 2-octenyl, 1,3-octadienyl, 2-nonenyl, 1,3-nonadienyl, 2-decenyl, etc., or the like. The alkenyl group may be substituted or unsubstituted.

[0056] The term “alkynyl” as used herein refers to an unsaturated branched, straight-chain, or cyclic alkyl group having 2 to 10 carbon atoms and having at least one carbon-carbon triple bond derived by the removal of one hydrogen atom from a single carbon atom of a parent alkyne. Exemplary alkynyls include ethynyl, 1-propynyl, 2-propynyl, 1-butynyl, 2-butynyl, 3-butynyl, 1-pentynyl, 2-pentynyl, 4-pentynyl, 1-octynyl, 6-methyl-1-heptynyl, 2-decynyl, or the like. The alkynyl group may be substituted or unsubstituted.

[0057] The term “hydroxyalkyl” alone or in combination, refers to an alkyl group as previously defined, wherein one or several hydrogen atoms, preferably one hydrogen atom has been replaced by a hydroxyl group. Examples include hydroxymethyl, hydroxyethyl and 2-hydroxyethyl.

[0058] The term “aminoalkyl” as used herein refers to the group —NRR′, where R and R′ may independently be hydrogen or (C₁-C₄) alkyl.

[0059] The term “alkylaminoalkyl” refers to an alkylamino group linked via an alkyl group (i.e., a group having the general structure -alkyl-NH-alkyl or -alkyl-N(alkyl)(alkyl)). Such groups include, but are not limited to, mono- and di-(C₁-C₈ alkyl)aminoC₁-C₈ alkyl, in which each alkyl may be the same or different.

[0060] The term “dialkylaminoalkyl” refers to alkylamino groups attached to an alkyl group. Examples include, but are not limited to, N,N-dimethylaminomethyl, N,N-dimethylaminoethyl N,N-dimethylaminopropyl, and the like. The term dialkylaminoalkyl also includes groups where the bridging alkyl moiety is optionally substituted.

[0061] The term “haloalkyl” refers to an alkyl group substituted with one or more halo groups, for example chloromethyl, 2-bromoethyl, 3-iodopropyl, trifluoromethyl, perfluoropropyl, 8-chlorononyl, or the like.

[0062] The term “carboxyalkyl” as used herein refers to the substituent —R^{Z}—COOH, wherein R¹⁰ is alkylene; and carbalkoxyalkyl refers to —R¹⁰—C(═O)OR¹¹, wherein R¹⁰ and R¹¹ are alkylene and alkyl respectively. In certain embodiments, alkyl refers to a saturated straight- or branched-chain hydrocarbyl radical of 1 to 6 carbon atoms such as methyl, ethyl, n-propyl, isopropyl, n-butyl, t-butyl, n-pentyl, 2-methylpentyl, n-hexyl, and so forth. Alkylene is the same as alkyl except that the group is divalent.

[0063] The term “alkoxy” includes substituted and unsubstituted alkyl, alkenyl, and alkynyl groups covalently linked to an oxygen atom. In one embodiment, the alkoxy group contains 1 to about 10 carbon atoms. Embodiments of alkoxy groups include, but are not limited to, methoxy, ethoxy, isopropyloxy, propoxy, butoxy, and pentoxy groups. Embodiments of substituted alkoxy groups include halogenated alkoxy groups. In a further embodiment, the alkoxy groups can be substituted with groups such as alkenyl, alkynyl, halogen, hydroxyl, alkylcarbonyloxy, arylcarbonyloxy, alkoxycarbonyloxy, aryloxycarbonyloxy, carboxylate, alkylcarbonyl, arylcarbonyl, alkoxycarbonyl, aminocarbonyl, alkylaminocarbonyl, dialkylaminocarbonyl, alkylthiocarbonyl, alkoxyl, phosphate, phosphonato, phosphinato, cyano, amino (including alkylamino, dialkylamino, arylamino, diarylamino, and alkylarylamino), acylamino (including alkylcarbonylamino, arylcarbonylamino, carbamoyl and ureido), amidino, imino, sulfhydryl, alkylthio, arylthio, thiocarboxylate, sulfates, alkylsulfinyl, sulfonato, sulfamoyl, sulfonamido, nitro, trifluoromethyl, cyano, azido, heterocyclyl, alkylaryl, or an aromatic or heteroaromatic moieties. Exemplary halogen substituted alkoxy groups include, but are not limited to, fluoromethoxy, difluoromethoxy, trifluoromethoxy, chloromethoxy, dichloromethoxy, and trichloromethoxy.

[0064] The term “alkoxyalkyl” refers to an alkylene group substituted with an alkoxy group. For example, methoxyethyl (CH₃OCH₂CH₂—) and ethoxymethyl (CH₃CH₂OCH₂—) are both C₃ alkoxyalkyl groups.

[0065] The term “aryl” as used herein refers to monocyclic or bicyclic aromatic hydrocarbon groups having from 6 to 12 carbon atoms in the ring portion, for example, phenyl, naphthyl, biphenyl and diphenyl groups, each of which may be substituted with, for example, one to four substituents such as alkyl; substituted alkyl as defined above, halogen, trifluoromethyl, trifluoromethoxy, hydroxy, alkoxy, cycloalkyloxy, alkanoyl, alkanoyloxy, amino, alkylamino, dialkylamino, nitro, cyano, carboxy, carboxyalkyl, carbamyl, carbamoyl and aryloxy. Specific embodiments of aryl groups in accordance with the present disclosure include phenyl, substituted phenyl, naphthyl, biphenyl, and diphenyl.

[0066] The term “aroyl,” as used alone or in combination herein, refers to an aryl radical derived from an aromatic carboxylic acid, such as optionally substituted benzoic or naphthoic acids.

[0067] The term “aralkyl” as used herein refers to an aryl group bonded to the 2-pyridinyl ring or the 4-pyridinyl ring through an alkyl group, preferably one containing 1 to 10 carbon atoms. A preferred aralkyl group is benzyl.

[0068] The term “carboxy,” as used herein, represents a group of the formula —C(═O)OH or —C(═O)O⁻.

[0069] The term “carbonyl” as used herein refers to a group in which an oxygen atom is double-bonded to a carbon atom —C═O.

[0070] The term “trifluoromethyl” as used herein refers to —CF₃.

[0071] The term “trifluoromethoxy” as used herein refers to —OCF₃.

[0072] The term “hydroxyl” as used herein refers to —OH or —O⁻.

[0073] The term “nitrile” or “cyano” as used herein refers to the group —CN.

[0074] The term “nitro,” as used herein alone or in combination refers to a —NO₂ group.

[0075] The term “amino” as used herein refers to the group —NR⁹R⁹, wherein R⁹ may independently be hydrogen, alkyl, aryl, alkoxy, or heteroaryl. The term “aminoalkyl” as used herein represents a more detailed selection as compared to “amino” and refers to the group —NR′R′, wherein R′ may independently be hydrogen or (C₁-C₄) alkyl. The term “dialkylamino” refers to an amino group having two attached alkyl groups that can be the same or different.

[0076] The term “alkanoylamino” refers to alkyl, alkenyl or alkynyl groups containing the group —C(═O)— followed by —N(H)—, for example acetylamino, propanoylamino and butanoylamino and the like.

[0077] The term “carbonylamino” refers to the group —NR′-CO—CH₂—R′, wherein R′ is independently selected from hydrogen or (C₁-C₄) alkyl.

[0078] The term “carbamoyl” as used herein refers to —O—C(O)NH₂.

[0079] The term “carbamyl” as used herein refers to a functional group in which a nitrogen atom is directly bonded to a carbonyl, i.e., as in —NR″C(═O)R″ or —C(═O)NR″R″, wherein R″ can be independently hydrogen, alkyl, substituted alkyl, alkenyl, substituted alkenyl, alkoxy, cycloalkyl, aryl, heterocyclo, or heteroaryl.

[0080] The term “alkylsulfonylamino” refers to refers to the group —NHS(O)₂R¹², wherein R¹² is alkyl.

[0081] The term “halogen” as used herein refers to bromine, chlorine, fluorine or iodine. In one embodiment, the halogen is fluorine. In another embodiment, the halogen is chlorine.

[0082] The term “heterocyclo” refers to an optionally substituted, unsaturated, partially saturated, or fully saturated, aromatic or nonaromatic cyclic group that is a 4 to 7 membered monocyclic, or 7 to 11 membered bicyclic ring system that has at least one heteroatom in at least one carbon atom-containing ring. The substituents on the heterocyclo rings may be selected from those given above for the aryl groups. Each ring of the heterocyclo group containing a heteroatom may have 1, 2, or 3 heteroatoms selected from nitrogen, oxygen or sulfur. Plural heteroatoms in a given heterocyclo ring may be the same or different.

[0083] Exemplary monocyclic heterocyclo groups include pyrrolidinyl, pyrrolyl, indolyl, pyrazolyl, imidazolyl, oxazolyl, isoxazolyl, thiazolyl, furyl, tetrahydrofuryl, thienyl, piperidinyl, piperazinyl, azepinyl, pyrimidinyl, pyridazinyl, tetrahydropyranyl, morpholinyl, dioxanyl, triazinyl and triazolyl. Preferred bicyclic heterocyclo groups include benzothiazolyl, benzoxazolyl, benzothienyl, quinolinyl, tetrahydroisoquinolinyl, benzimidazolyl, benzofuryl, indazolyl, benzisothiazolyl, isoindolinyl and tetrahydroquinolinyl. In more detailed embodiments heterocyclo groups may include indolyl, imidazolyl, furyl, thienyl, thiazolyl, pyrrolidyl, pyridyl and pyrimidyl.

[0084] “Substituted” refers to a group in which one or more hydrogen atoms are each independently replaced with the same or different substituent(s). Representative substituents include —X, —R⁶, —O—, ═O, —OR, —SR⁶, —S—, ═S, —NR⁶R⁶, ═NR⁶, —CX₃, —CF₃, —CN, —OCN, —SCN, —NO, —NO₂, ═N₂, —N₃, —S(═O)₂2O, —S(═O)₂OH, —S(═O)₂R⁶, —OS(═O)₂O—, —OS(═O)₂OH, —OS(═O)₂R⁶, —P(═O)(O⁻)₂, —P(═O)(OH)(O⁻), —OP(═O)₂(O⁻), —C(—O)R⁶, —C(═S)R⁶, —C(═O)OR⁶, —C(═O)O⁻, —C(═S)OR⁶, —NR⁶—C(═O)—N(R⁶)₂, —NR⁶—C(═S)—N(R⁶)₂, and —C(═NR⁶)NR⁶R⁶, wherein each X is independently a halogen; and each R⁶ is independently hydrogen, halogen, alkyl, aryl, arylalkyl, arylaryl, arylheteroalkyl, heteroaryl, heteroarylalkyl, NR⁷R⁷, —C(═O)R⁷, and —S(═O)₂R⁷; and each R⁷ is independently hydrogen, alkyl, alkanyl, alkynyl, aryl, arylalkyl, arylheteralkyl, arylaryl, heteroaryl or heteroarylalkyl. Aryl containing substituents, whether or not having one or more substitutions, may be attached in a para (p-), meta (m-) or ortho (o-) conformation, or any combination thereof.

Erythroblastic Leukemia Viral Oncogene Homolog (ERBB) Family—Exemplary dsRNA Molecules

[0085] In general, ERBB family proteins (EGFR, ERBB2, ERBB3 and ERBB4) share a common molecular structure that includes three distinct regions: an extracellular ligand-binding region, a single transmembrane region, and an intracellular tyrosine kinase domain that is flanked by a regulatory region (Burgess et al., Mol. Cell. 12:541, 2003). The extracellular region has two domains (L1 and L2) that recognize and bind ligand, and two cysteine-rich sub-domains (S1 and S2) that are involved in dimerization. The cytoplasmic region contains six tyrosine residues that are available for phosphorylation, an SH1 domain that has tyrosine kinase activity, and a juxtamembrane domain.

[0086] The epidermal growth factor receptor (erythroblastic leukemia viral (v-erb-b) oncogene homolog, avian) (EGFR; also known as ErbB, ErbB1, mENA, human epidermal growth factor receptor-1, HER-1) has been found to be expressed in a variety of cancer tissues, including breast, head and neck, bladder, prostate, kidney, and non-small-cell lung cancer. Constitutive activation of EGFR associated with autocrine loops of growth factors is also observed in human tumors. For example, transforming growth factor-α (TGF-α) is frequently coexpressed with EGFR in non-small cell lung cancers (Seth et al., Br. J. Cancer 80:657, 1999), prostate cancer (Cai et al., Virchows Arch. 435:112, 1999), and gastrointestinal stromal tumors (Hsieh et al., 2000). In invasive breast carcinomas, coexpression of EGFR and TGF-α had a significant correlation with a worse patient prognosis (Umekita et al., Int. J. Cancer 89:484, 2000).

[0087] The v-erb-b2 erythroblastic leukemia viral oncogene homolog 2, neuro/glioblastoma derived oncogene homolog (ERBB2; also known as erbB-2, human epidermal growth factor receptor-2, HER-2, HER-2/neu, herstatin, NEU, NGL, TKR1, c-erb B2, c-erb B2/neu protein, neuroblastoma/glioblastoma derived oncogene homolog, tyrosine kinase-type cell surface receptor) currently has no known ligand, but likely interacts as a heterodimerization partner with other EGFR family members that do have ligands (Citri et al., Exp. Cell Res. 284:54, 2003; Yarden, Oncology 61(Suppl 2):1, 2001). ERBB2 is overexpressed in various cancers, including breast, lung, pancreatic, colon, esophageal, endometrial, and cervical cancers. ERBB2 is also known to be involved in intracellular signal transduction and intracellular trafficking (e.g., to the nucleus), and may play a role in non-cancer diseases such as schizophrenia, chronic renal disease, hypertension, and the cellular entry of certain infectious pathogens (Linggi and Carpenter, Trends Cell Biol. 16:649, 2006).

[0088] The v-erb-b2 erythroblastic leukemia viral oncogene homolog 3 (also known as ERBB3, human epidermal growth factor receptor-3, HER-3, tyrosine kinase-type cell surface receptor HER3, HER3, ErbB-3; c-erbB3; erbB3-S; MDA-BF-1; MGC88033; c-erbB-3; p180-ErbB3; p45-sErbB3; p85-sErbB3), has no apparent intrinsic tyrosine kinase activity, but does interact with other ERBB family members, which may be considered ERBB3 co-receptors for efficient intracellular signal transduction resulting in cell proliferation associated with cancer (e.g., breast cancer). ERBB3 can dimerize with ERBB2 to form a high affinity receptor for NRG-1 (also known as heregulin) and interruption of the consequent intracellular signal transduction pathway may have therapeutic potential in, for example, lung cancer (Gollamudi et al., Lung Cancer 43:135, 2004). A human breast cancer tumor tissue microarray revealed an association between ERBB3 expression and metastasis (independent of tumor size), which indicates that ERBB3-dependent signaling through ERBB3/ERBB2 heterodimers can contribute to metastasis by enhancing tumor cell invasion and intravasation in vivo (Xue et al., Cancer Res. 66:1418, 2006).

[0089] The v-erb-a erythroblastic leukemia viral oncogene homolog 4 (avian) (ERBB4; also known as ERbB4, human epidermal growth factor receptor-1, HER-4, MGC138404, p180erbB4) is a protein tyrosine kinase receptor for NDF/heregulin that regulates cell proliferation and differentiation. The ErbB2/ErbB4 heterodimer is implicated in cardiovascular development (Britsch et al., Genes Dev. 12:1825, 1998, Lee et al., Nature 378:394, 1995). ErbB4 not bound to ligand adopts a tethered conformation similar to that observed for inactive forms of ErbB1 and ErbB3, indicating that it requires active ligand binding to promote dimer formation. ERBB4 expression is strongest in the epithelial lining of the gastrointestinal, urinary, reproductive, and respiratory tracts, as well as in skin, skeletal muscle, circulatory, endocrine, and nervous systems.

[0090] More detail regarding the ERBB family (EGFR, ERBB2, ERBB3, ERBB4), along with any related disorders are described at the Online Mendelian Inheritance in Man database at www.ncbi.nlm.nih.gov/entrez/query.fcgi?db=OMIM (OMIM Accession Nos. 131550, 164870, 190151, and 600543, respectively). The complete human EGFR variant 1, EGFR variant 2, EGFR variant 3, EGFR variant 4, ERBB2 variant 1, ERBB2 variant 2, ERBB3 variant 1, ERBB3 variant s, and ERBB4 mRNA sequences have GenBank accession numbers NM_{—}005228.3 (SEQ ID NO:73), NM_{—}201282.1 (SEQ ID NO:74), NM_{—}201283.1 (SEQ ID NO:75), NM_{—}201284.1 (SEQ ID NO:76), NM_{—}004448.2 (SEQ ID NO:77), NM_{—}001005862.1 (SEQ ID NO:78), NM_{—}001982.2 (SEQ ID NO:79), NM_{—}001005915.1 (SEQ ID NO:80), and NM 005235.2 (SEQ ID NO:81), respectively. As used herein, reference to EGFR, ERBB2, ERBB3, and ERBB4 mRNAs or RNA sequences or sense strands means an RNA encompassed by SEQ ID NOS:1158, 1159, 1160, 1161, 1162, 1163, 1164, 1165, and 1166, respectively, as well as variants, isoforms, and homologs having at least 80% or more identity with human EGFR, ERBB2, ERBB3, or ERBB4 sequence as set forth in SEQ ID NO:1158, 1159, 1160, 1161, 1162, 1163, 1164, 1165, or 1166, respectively.

[0091] The “percent identity” between two or more nucleic acid sequences is a function of the number of identical positions shared by the sequences (i.e., % identity=number of identical positions/total number of positions ×100), taking into account the number of gaps, and the length of each gap that needs to be introduced to optimize alignment of two or more sequences. The comparison of sequences and determination of percent identity between two or more sequences can be accomplished using a mathematical algorithm, such as BLAST and Gapped BLAST programs at their default parameters (e.g., Altschul et al., J. Mol. Biol. 215:403, 1990; see also BLASTN at www.ncbi.nlm.nih.gov/BLAST).

[0092] In one aspect, the instant disclosure provides a meroduplex ribonucleic acid (mdRNA) molecule, comprising a first strand that is complementary to an erythroblastic leukemia viral oncogene homolog (ERBB) mRNA as set forth in SEQ ID NO:1158, 1159, 1160, or 1161 (i.e., EGFR variant 1, 2, 3, or 4) and is fully complementary, with up to three mismatches, to at least one other human ERBB family mRNA selected from SEQ ID NO:1162, 1163, 1164, 1165, or 1166 (i.e., ERBB2 variant 1, ERBB2 variant 2, ERBB3 variant 1, ERBB3 variant s, ERBB4, respectively), and a second strand and a third strand that is each complementary to non-overlapping regions of the first strand, wherein the second strand and third strands can anneal with the first strand to form at least two double-stranded regions spaced apart by up to 10 nucleotides and thereby forming a gap between the second and third strands, and wherein (a) at least one double-stranded region comprises from about 5 base pairs to 13 base pairs, or (b) wherein the combined double-stranded regions total about 15 base pairs to about 40 base pairs and the mdRNA molecule optionally has blunt ends; wherein at least one pyrimidine of the mdRNA is substituted with a pyrimidine nucleoside according to Formula I or II:

[chemical structure]

wherein R¹ and R² are each independently a —H, —OH, —OCH₃, —OCH₂OCH₂CH₃, —OCH₂CH₂OCH₃, halogen, substituted or unsubstituted C₁-C₁₀ alkyl, alkoxy, alkoxyalkyl, hydroxyalkyl, carboxyalkyl, alkylsulfonylamino, aminoalkyl, dialkylamino, alkylaminoalkyl, dialkylaminoalkyl, haloalkyl, trifluoromethyl, cycloalkyl, (cycloalkyl)alkyl, substituted or unsubstituted C₂-C₁₀ alkenyl, substituted or unsubstituted —O-allyl, —O—CH₂CH═CH₂, —O—CH═CHCH₃, substituted or unsubstituted C₂-C₁₀ alkynyl, carbamoyl, carbamyl, carboxy, carbonylamino, substituted or unsubstituted aryl, substituted or unsubstituted aralkyl, —NH₂, —NO₂, —C≡N, or heterocyclo group; R³ and R⁴ are each independently a hydroxyl, a protected hydroxyl, a phosphate, or an internucleoside linking group; and R⁵ and R⁸ are each independently O or S. In certain embodiments, at least one nucleoside is according to Formula I in which R¹ is methyl and R² is —OH, or R¹ is methyl, R² is —OH, and R⁸ is S. In other embodiments, the internucleoside linking group covalently links from about 5 to about 40 nucleosides. In some embodiments, the gap comprises at least one unpaired nucleotide in the first strand positioned between the double-stranded regions formed by the second and third strands when annealed to the first strand, or the gap is a nick. In certain embodiments, the nick or gap is located 10 nucleotides from the 5′-end of the first (antisense) strand or at the Argonaute cleavage site. In another embodiment, the meroduplex nick or gap is positioned such that the thermal stability is maximized for the first and second strand duplex and for the first and third strand duplex as compared to the thermal stability of such meroduplexes having a nick or gap in a different position.

[0093] In still another aspect, the instant disclosure provides an mdRNA molecule, comprising a first strand that is complementary to an erythroblastic leukemia viral oncogene homolog (ERBB) mRNA as set forth in SEQ ID NO:1158, 1159, 1160, or 1161 and is fully complementary, with up to three mismatches, to at least one other human ERBB family mRNA selected from SEQ ID NO:1162, 1163, 1164, 1165, or 1166, and a second strand and a third strand that are each complementary to non-overlapping regions of the first strand, wherein the second strand and third strands can anneal with the first strand to form at least two double-stranded regions spaced apart by up to 10 nucleotides and thereby forming a gap between the second and third strands, and wherein the mdRNA molecule optionally includes at least one double-stranded region of 5 base pairs to 13 base pairs. In a further aspect, the instant disclosure provides an mdRNA molecule having a first strand that is complementary to an EGFR mRNA as set forth in SEQ ID NO:1158, 1159, 1160, or 1161 and is fully complementary, with up to three mismatches, to at least one other human ERBB family mRNA selected from SEQ ID NO:1162, 1163, 1164, 1165, or 1166, and a second strand and a third strand that are each complementary to non-overlapping regions of the first strand, wherein the second strand and third strands can anneal with the first strand to form at least two double-stranded regions spaced apart by up to 10 nucleotides and thereby forming a gap between the second and third strands, and wherein the combined double-stranded regions total about 15 base pairs to about 40 base pairs and the mdRNA molecule optionally has blunt ends. In some embodiments, the gap comprises at least one unpaired nucleotide in the first strand positioned between the double-stranded regions formed by the second and third strands when annealed to the first strand, or the gap is a nick. In certain embodiments, the nick or gap is located between nucleotides 9 and 10 from the 5′-end of the second (a portion of the sense) strand or at the Argonaute cleavage site. In another embodiment, the nick or gap is located in a position wherein each of the two or more nicked or gapped strands has a maximal melting temperature (i.e., Tₘ or temperature at which 50% of one of the nicked or gapped strands is annealed to the first strand).

[0094] In certain embodiments, the instant disclosure provides an mdRNA molecule, comprising a first strand that is complementary to an erythroblastic leukemia viral oncogene homolog (ERBB) mRNA as set forth in SEQ ID NO: 1162 or 1163 (i.e., ERBB2) and is fully complementary, with up to three mismatches, to at least one other human ERBB family mRNA selected from SEQ ID NO:1158, 1159, 1160, 1161, 1164, 1165, or 1166 (i.e., EGFR, ERBB3, ERBB4, respectively). In further embodiments, the instant disclosure provides an mdRNA molecule, comprising a first strand that is complementary to an erythroblastic leukemia viral oncogene homolog (ERBB) mRNA as set forth in SEQ ID NO:1164 or 1165 (i.e., ERBB3) and is fully complementary, with up to three mismatches, to at least one other human ERBB family mRNA selected from SEQ ID NO:1158, 1159, 1160, 1161, 1162, 1163, or 1166 (i.e., EGFR, ERBB2, ERBB4, respectively). In still a further embodiment, the instant disclosure provides an mdRNA molecule, comprising a first strand that is complementary to an erythroblastic leukemia viral oncogene homolog (ERBB) mRNA as set forth in SEQ ID NO:1166 (i.e., ERBB4) and is fully complementary, with up to three mismatches, to at least one other human ERBB family mRNA selected from SEQ ID NO:1158, 1159, 1160, 1161, 1162, 1163, 1164, or 1165 (i.e., EGFR, ERBB3, ERBB3, respectively).

[0095] As provided herein, any of the aspects or embodiments disclosed herein would be useful in treating an ERBB or ERBB family-associated disease or disorder, such as hyperproliferative disease (e.g., cancer) or inflammatory disorders (e.g., arthritis). An advantage of the instant disclosure is the ability to use a single dsRNA to knockdown mRNA expression of one or more ERBB family member. For example, one or more dsRNA may be used to knockdown expression of an ERBB family mRNA as set forth in SEQ ID NO:1158-1166, or any combination thereof. In one embodiment, one or more dsRNA can be used to knockdown SEQ ID NOS: NOS:1158-1166—that is all EGFR variants, both ERBB2 variants, both ERBB3 variants, and ERBB4. In further embodiments, one or more dsRNA can be used to knockdown SEQ ID NOS:1158-1164, and 1166—that all EGFR variants, both ERBB2 variants, ERBB3 variant 1, and ERBB4. In another embodiment, one or more dsRNA can be used to knockdown SEQ ID NOS:1158, 1159, 1161-1164, and 1166—that is EGFR variants 1, 2, and 4, both ERBB2 variants, ERBB3 variant 1, and ERBB4. In certain embodiments, one or more dsRNA can be used to knockdown SEQ ID NOS:1158, 1162-1164, and 1166—that is EGFR variant 1, both ERBB2 variants, ERBB3 variant 1, and ERBB4. In further embodiments, one or more dsRNA can be used to knockdown SEQ ID NOS:1158-1165—that is all EGFR variants, both ERBB2 variants, and both ERBB3 variants.

[0096] In further embodiments, one or more dsRNA can be used to knockdown SEQ ID NOS:1158-1164—that is all EGFR variants, both ERBB2 variants, and ERBB3 variant 1. In further embodiments, one or more dsRNA can be used to knockdown SEQ ID NOS:1158-1163, and 1166—that is all EGFR variants, both ERBB2 variants, and ERBB4. In further embodiments, one or more dsRNA can be used to knockdown SEQ ID NOS:1158-1161 and 1164-1166—that is all EGFR variants, both ERBB3 variants, and ERBB4. In further embodiments, one or more dsRNA can be used to knockdown SEQ ID NOS:1158-1161, 1164, and 1166—that is all EGFR variants, ERBB3 variant 1, and ERBB4. In further embodiments, one or more dsRNA can be used to knockdown SEQ ID NOS:1158, 1159, 1161, 1162, 1163, and 1164—that is EGFR variants 1, 2, and 4, both ERBB2 variants, and ERBB3 variant 1. In further embodiments, one or more dsRNA can be used to knockdown SEQ ID NOS:1158, 1159, 1161-1163, and 1166—that is EGFR variants 1, 2 and 4, both ERBB2 variants, and ERBB4. In further embodiments, one or more dsRNA can be used to knockdown SEQ ID NOS:1158, 1159, 1161, 1164, and 1166—that is EGFR variants 1, 2 and 4, ERBB3 variant 1, and ERBB4. In further embodiments, one or more dsRNA can be used to knockdown SEQ ID NOS:1161-1163 and 1166—that is EGFR variant 4, both ERBB2 variants, and ERBB4. In further embodiments, one or more dsRNA can be used to knockdown SEQ ID NOS:1158, 1162, 1163, and 1164—that is EGFR variant 1, both ERBB2 variants, and ERBB3 variant 1. In further embodiments, one or more dsRNA can be used to knockdown SEQ ID NOS:1158, 1162, 1163, and 1166—that is EGFR variant 1, both ERBB2 variants, and ERBB4. In further embodiments, one or more dsRNA can be used to knockdown SEQ ID NOS:1158, 1164, and 1166—that is EGFR variant 1, ERBB3 variant 1, and ERBB4.

[0097] In further embodiments, one or more dsRNA can be used to knockdown SEQ ID NOS:1158-1163—that is all EGFR variants and both ERBB2 variants. In further embodiments, one or more dsRNA can be used to knockdown SEQ ID NOS:1158-1161, 1164, and 1165—that is all EGFR variants and both ERBB3 variants. In further embodiments, one or more dsRNA can be used to knockdown SEQ ID NOS:1158-1161, and 1164—that is all EGFR variants and ERBB3 variant 1. In further embodiments, one or more dsRNA can be used to knockdown SEQ ID NOS:1158-1161, and 1166—that is al EGFR variants and ERBB4. In further embodiments, one or more dsRNA can be used to knockdown SEQ ID NOS:1158, 1159, and 1161-1163—that is EGFR variants 1, 2, and 4, and both ERBB2 variants. In further embodiments, one or more dsRNA can be used to knockdown SEQ ID NOS:1158, 1159, 1161, and 1164—that is EGFR variants 1, 2 and 4, and ERBB3 variant 1. In further embodiments, one or more dsRNA can be used to knockdown SEQ ID NOS:1158, 1159, 1161, and 1166—that is EGFR variants 1, 2 and 4, and ERBB4. In further embodiments, one or more dsRNA can be used to knockdown SEQ ID NOS:1159, 1161, and 1166—that is EGFR variants 2 and 4, and ERBB4. In further embodiments, one or more dsRNA can be used to knockdown SEQ ID NOS:1161-1163—that is EGFR variant 4, and both ERBB2 variants. In further embodiments, one or more dsRNA can be used to knockdown SEQ ID NOS:1161 and 1166—that is EGFR variant 4, and ERBB4. In further embodiments, one or more dsRNA can be used to knockdown SEQ ID NOS:1159 and 1166—that is EGFR variant 2, and ERBB4. In further embodiments, one or more dsRNA can be used to knockdown SEQ ID NOS:1158, 1162, and 1163—that is EGFR variant 1, and both ERBB2 variants. In further embodiments, one or more dsRNA can be used to knockdown SEQ ID NOS:1158 and 1164—that is EGFR variant 1, and ERBB3 variant 1. In further embodiments, one or more dsRNA can be used to knockdown SEQ ID NOS:1158 and 1166—that is EGFR variant 1, and ERBB4.

[0098] In further embodiments, one or more dsRNA can be used to knockdown SEQ ID NOS:1162 and 1166—that is all ERBB2 variant 1 and ERBB4. In further embodiments, one or more dsRNA can be used to knockdown SEQ ID NOS:1163 and 1166—that is ERBB2 variant 2 and ERBB4. In further embodiments, one or more dsRNA can be used to knockdown SEQ ID NOS:1162-1164—that is both ERBB2 variants and ERBB3 variant 1. In further embodiments, one or more dsRNA can be used to knockdown SEQ ID NOS:1162, 1163, and 1166—that is both ERBB2 variants and ERBB4. In further embodiments, one or more dsRNA can be used to knockdown SEQ ID NOS:1163-1165—that is both ERBB2 variants and both ERBB3 variants. In further embodiments, one or more dsRNA can be used to knockdown SEQ ID NOS:1164 and 1166—that is ERBB3 variant 1 and ERBB4. In further embodiments, one or more dsRNA can be used to knockdown SEQ ID NOS:1164-1166—that is both ERBB3 variants and ERBB4.

[0099] In some embodiments, the dsRNA comprises at least three strands in which the first strand comprises about 5 nucleotides to about 40 nucleotides, and the second and third strands include each, individually, about 5 nucleotides to about 20 nucleotides, wherein the combined length of the second and third strands is about 15 nucleotides to about 40 nucleotides. In other embodiments, the dsRNA comprises at least two or three strands in which the first strand comprises about 15 nucleotides to about 24 nucleotides or about 25 nucleotides to about 40 nucleotides. In further embodiments, the first strand will be complementary to at least about 15, 16, 17, 18, 19, 20, 21, 22, 23, 24, 25, 26, 27, 28, 29, 30, 31, 32, 33, 34, 35, 36, 37, 38, 39, or 40 contiguous nucleotides of a second strand or a second and third strand or to a plurality of strands. In certain embodiments, the second and third strand or the plurality of strands complementary to the first strand have a nick or gap that is located between nucleotides 9 and 10 from the 5′-end of the second (a portion of the sense) strand or at the Argonaute cleavage site or within 5 to 10 nucleotides of the Argonaute cleavage site. In another embodiment, the nick or gap is located in a position wherein each of the two or more nicked or gapped strands has a maximal melting temperature (i.e., Tₘ or temperature at which 50% of one of the nicked or gapped strands is annealed to the first strand).

[0100] In further examples, the first strand and its complement(s) will be able to form dsRNA or mdRNA molecules of this disclosure with about 19 to about 25 nucleotides of the first strand that is complementary to an ERBB or ERBB family mRNA. For example, a Dicer substrate dsRNA can have about 25 nucleotides to about 40 nucleotides, but only 19 nucleotides of the antisense (first) strand will be complementary to an ERBB or ERBB family mRNA. In further embodiments, the first strand can have complementarity with an ERBB or ERBB family mRNA in about 19 nucleotides to about 25 nucleotides and have one, two, or three mismatches with the ERBB or ERBB family mRNA, such as a sequence set forth in SEQ ID NO:1158, 1159, 1160, 1161, 1162, 1163, 1164, 1165, 1166, or any combination thereof, or the first strand of 19 nucleotides to about 25 nucleotides, that for example activates or is capable of loading into RISC, will have at least 80% identity with the corresponding nucleotides found in an ERBB or ERBB family mRNA, such as a sequence set forth in SEQ ID NO:1158, 1159, 1160, 1161, 1162, 1163, 1164, 1165, 1166, or any combination thereof.

[0101] In certain embodiments, one or more dsRNA comprise a first strand having full complementarity to SEQ ID NOS:1158 and having zero, one, two, or three mismatches with a sequence set forth in SEQ ID NOS:1162 and 1163—that is, full complementarity with EGFR variant 1 and up to three mismatches with both ERBB2 variants. In further embodiments, one or more dsRNA comprise a first strand having full complementarity to SEQ ID NO:1158 and having zero, one, two, or three mismatches with a sequence set forth in SEQ ID NO:1164—that is, full complementarity with EGFR variant 1 and up to three mismatches with ERBB3 variant 1. In certain embodiments, one or more dsRNA comprise a first strand having full complementarity to SEQ ID NOS:1158-1162 and having one, two, or three mismatches with a sequence set forth in SEQ ID NOS:1162 and 1163—that is, full complementarity with all EGFR variants and one to three mismatches with both ERBB2 variants. In further embodiments, one or more dsRNA comprise a first strand having full complementarity to SEQ ID NOS:1158, 1159, and 1161 and having three mismatches with a sequence set forth in SEQ ID NOS:1162 and 1163—that is, full complementarity with EGFR variants 1, 2 and 4, and three mismatches with both ERBB2 variants. In further embodiments, one or more dsRNA comprise a first strand having full complementarity to SEQ ID NOS:1158, 1159, and 1161 and having three mismatches with a sequence set forth in SEQ ID NO:1164—that is, full complementarity with EGFR variants 1, 2 and 4, and three mismatches with ERBB3 variant 1. In further embodiments, one or more dsRNA comprise a first strand having full complementarity to SEQ ID NOS:1158, 1159, and 1161 and having one, two, or three mismatches with a sequence set forth in SEQ ID NO:1166—that is, full complementarity with EGFR variants 1, 2 and 4, and one to three mismatches with ERBB4.

[0102] In further embodiments, one or more dsRNA comprise a first strand having full complementarity to SEQ ID NOS:1159 and 1161, and having two mismatches with a sequence set forth in SEQ ID NO:1166—that is, full complementarity with EGFR variants 2 and 4, and two mismatches with ERBB4. In further embodiments, one or more dsRNA comprise a first strand having full complementarity to SEQ ID NO:1159 and having two or three mismatches with a sequence set forth in SEQ ID NO:1166—that is, full complementarity with EGFR variant 2, and two to three mismatches with ERBB4. In further embodiments, one or more dsRNA comprise a first strand having full complementarity to SEQ ID NO:1161 and having three mismatches with a sequence set forth in SEQ ID NO:1166—that is, full complementarity with EGFR variant 4, and three mismatches with ERBB4. In further embodiments, one or more dsRNA comprise a first strand having full complementarity to SEQ ID NO:1161 and having three mismatches with a sequence set forth in SEQ ID NOS:1162 and 1163—that is, full complementarity with EGFR variant 4, and three mismatches with both ERBB2 variants.

[0103] In further embodiments, one or more dsRNA comprise a first strand having full complementarity to SEQ ID NOS:1162 and 1163, and having zero, one, two, or three mismatches with a sequence set forth in SEQ ID NO:1166—that is, full complementarity with both ERBB2 variants and up to three mismatches with ERBB4. In further embodiments, one or more dsRNA comprise a first strand having full complementarity to SEQ ID NOS:1162 and 1163, and having one, two, or three mismatches with a sequence set forth in SEQ ID NO:1164—that is, full complementarity with both ERBB2 variants and one to three mismatches with ERBB3 variant 1. In further embodiments, one or more dsRNA comprise a first strand having full complementarity to SEQ ID NOS:1162 and 1163, and having two or three mismatches with a sequence set forth in SEQ ID NO:1165—that is, full complementarity with both ERBB2 variants and two to three mismatches with both ERBB3 variants. In further embodiments, one or more dsRNA comprise a first strand having full complementarity to SEQ ID NO:1162 and having three mismatches with a sequence set forth in SEQ ID NO:1166—that is, full complementarity with ERBB2 variant 1 and three mismatches with ERBB4. In further embodiments, one or more dsRNA comprise a first strand having full complementarity to SEQ ID NO:1163 and having two or three mismatches with a sequence set forth in SEQ ID NOS:1164—that is, full complementarity with ERBB2 variant 2 and two to three mismatches with ERBB3 variant 1. In further embodiments, one or more dsRNA comprise a first strand having full complementarity to SEQ ID NOS:1164 and 1165, and having one, two, or three mismatches with a sequence set forth in SEQ ID NO:1166—that is, full complementarity with both ERBB3 variants and one to three mismatches with ERBB4. In further embodiments, one or more dsRNA comprise a first strand having full complementarity to SEQ ID NO:1164, and having zero, one, two, or three mismatches with a sequence set forth in SEQ ID NO:1166—that is, full complementarity with ERBB3 variant 1 and up to three mismatches with ERBB4. In further embodiments, one or more dsRNA comprise a first strand having full complementarity to SEQ ID NO:1166, and three mismatches with a sequence set forth in SEQ ID NO:1165—that is, full complementarity with ERBB4 and three mismatches with ERBB3 variant s.

[0104] Certain illustrative sense strand molecules that can be used to design mdRNA molecules as described herein, can be found in Table A of U.S. Provisional Patent Application No. 60/932,970 (filed May 22, 2007) and in the Sequence Listing submitted herewith (text file named “07-R017PCT_Sequence_Listing”, created Feb. 20, 2008 and having a size of 783 kilobytes), which are both herein incorporated by reference. Also incorporated herein by reference in its entirety is the content of Table B as disclosed in U.S. Provisional Patent Application No. 60/934,930 (filed Mar. 16, 2007), which was submitted with that application as a separate text file named “Table_B_Human_RefSeq_Accession_Numbers.txt” (created Mar. 16, 2007 and having a size of 3,604 kilobytes).

Substituting and Modifying ERBB dsRNA Molecules

[0105] The introduction of substituted and modified nucleotides into mdRNA and dsRNA molecules of this disclosure provides a powerful tool in overcoming potential limitations of in vivo stability and bioavailability inherent to native RNA molecules (i.e., having standard nucleotides) that are exogenously delivered. For example, the use of dsRNA molecules of this disclosure can enable a lower dose of a particular nucleic acid molecule for a given therapeutic effect (e.g., reducing or silencing ERBB family expression) since dsRNA molecules of this disclosure tend to have a longer half-life in serum. Furthermore, certain substitutions and modifications can improve the bioavailability of dsRNA by targeting particular cells or tissues or improving cellular uptake of the dsRNA molecules. Therefore, even if the activity of a dsRNA molecule of this disclosure is reduced as compared to a native RNA molecule, the overall activity of the substituted or modified dsRNA molecule can be greater than that of the native RNA molecule due to improved stability or delivery of the molecule. Unlike native unmodified dsRNA, substituted and modified dsRNA can also minimize the possibility of activating the interferon response in, for example, humans.

[0106] In certain embodiments, a dsRNA molecule of this disclosure has at least one uridine, at least three uridines, or each and every uridine (i.e., all uridines) of the first (antisense) strand of that is a 5-methyluridine, 2-thioribothymidine, 2′-O-methyl-5-methyluridine, or any combination thereof. In a related embodiment, the dsRNA molecule or analog thereof of this disclosure has at least one uridine, at least three uridines, or each and every uridine of the second (sense) strand of the dsRNA is a 5-methyluridine, 2-thioribothymidine, 2′-O-methyl-5-methyluridine, or any combination thereof. In a related embodiment, the dsRNA molecule of this disclosure has at least one uridine, at least three uridines, or each and every uridine of the third (sense) strand of the dsRNA is a 5-methyluridine, 2-thioribothymidine, 2′-O-methyl-5-methyluridine, or any combination thereof. In still another embodiment, the dsRNA molecule of this disclosure has at least one uridine, at least three uridines, or each and every uridine of both the first (antisense) and second (sense) strands; of both the first (antisense) and third (sense) strands; of both the second (sense) and third (sense) strands; or of all of the first (antisense), second (sense) and third (sense) strands of the dsRNA are a 5-methyluridine, 2-thioribothymidine, 2′-O-methyl-5-methyluridine, or any combination thereof. In some embodiments, the double-stranded region of a dsRNA molecule has at least three 5-methyluridines, 2-thioribothymidine, 2′-O-methyl-5-methyluridine, or any combination thereof. In certain embodiments, dsRNA molecules comprise ribonucleotides at about 5% to about 95% of the nucleotide positions in one strand, both strands, or any combination thereof.

[0107] In further embodiments, a dsRNA molecule that decreases expression of one or more ERBB family gene by RNAi according to the instant disclosure further comprises one or more natural or synthetic non-standard nucleoside. In related embodiments, the non-standard nucleoside is one or more deoxyuridine, locked nucleic acid (LNA) molecule (e.g., a 5-methyluridine LNA), a universal-binding nucleotide, or any combination thereof. In certain embodiments, the universal-binding nucleotide can be C-phenyl, C-naphthyl, inosine, azole carboxamide, 1-β-D-ribofuranosyl-4-nitroindole, 1-β-D-ribofuranosyl-5-nitroindole, 1-β-D-ribofuranosyl-6-nitroindole, or 1-β-D-ribofuranosyl-3-nitropyrrole.

[0108] Substituted or modified nucleotides present in dsRNA molecules, preferably in the sense or antisense strand, but also optionally in both the antisense and sense strands, comprise modified or substituted nucleotides according to this disclosure having properties or characteristics similar to natural or standard ribonucleotides. For example, this disclosure features dsRNA molecules including nucleotides having a Northern conformation (e.g., Northern pseudorotation cycle; see, e.g., Saenger, Principles of Nucleic Acid Structure, Springer-Verlag ed., 1984). As such, chemically modified nucleotides present in dsRNA molecules of this disclosure, preferably in the antisense strand, but also optionally in the sense or both the antisense and sense strands, are resistant to nuclease degradation while at the same time maintaining the capacity to mediate RNAi. Exemplary nucleotides having a Northern configuration include locked nucleic acid (LNA) nucleotides (e.g., 2′-O, 4′-C-methylene-(D-ribofuranosyl) nucleotides); 2′-methoxyethyl (MOE) nucleotides; 2′-methyl-thio-ethyl, 2′-deoxy-2′-fluoro nucleotides, 2′-deoxy-2′-chloro nucleotides, 2′-azido nucleotides, 5-methyluridines, or 2′-O-methyl nucleotides. In certain embodiments, the LNA is a 5-methyluridine LNA or 2-thio-5-methyluridine LNA. In any of these embodiments, one or more substituted or modified nucleotides can be a G clamp (e.g., a cytosine analog that forms an additional hydrogen bond to guanine, such as 9-(aminoethoxy)phenoxazine; see, e.g., Lin and Mateucci, J. Am. Chem. Soc. 120:8531, 1998).

[0109] As described herein, the first and one or more second strands of a dsRNA molecule or analog thereof provided by this disclosure can anneal or hybridize together (i.e., due to complementarity between the strands) to form at least one double-stranded region having a length of about 4 to about 10 base pairs, about 5 to about 13 base pairs, or about 15 to about 40 base pairs. In some embodiments, the dsRNA has at least one double-stranded region ranging in length from about 15 to about 24 base pairs or about 19 to about 23 base pairs. In other embodiments, the dsRNA has at least one double-stranded region ranging in length from about 26 to about 40 base pairs or about 27 to about 30 base pairs or about 30 to about 35 base pairs. In other embodiments, the two or more strands of a dsRNA molecule of this disclosure may optionally be covalently linked together by nucleotide or non-nucleotide linker molecules.

[0110] In certain embodiments, the dsRNA molecule or analog thereof comprises an overhang of one to four nucleotides on one or both 3′-ends of the dsRNA, such as an overhang comprising a deoxyribonucleotide or two deoxyribonucleotides (e.g., thymidine, adenine). In certain embodiments, the 3′-end comprising one or more deoxyribonucleotide is in an mdRNA molecule and is either in the gap, not in the gap, or any combination thereof. In some embodiments, dsRNA molecules or analogs thereof have a blunt end at one or both ends of the dsRNA. In certain embodiments, the 5′-end of the first or second strand is phosphorylated. In any of the embodiments of dsRNA molecules described herein, the 3′-terminal nucleotide overhangs can comprise ribonucleotides or deoxyribonucleotides that are chemically-modified at a nucleic acid sugar, base, or backbone. In any of the embodiments of dsRNA molecules described herein, the 3′-terminal nucleotide overhangs can comprise one or more universal base ribonucleotides. In any of the embodiments of dsRNA molecules described herein, the 3′-terminal nucleotide overhangs can comprise one or more acyclic nucleotides. In any of the embodiments of dsRNA molecules described herein, the dsRNA can further comprise a terminal phosphate group, such as a 5′-phosphate (see Martinez et al., Cell 110:563, 2002; and Schwarz et al., Molec. Cell 10:537, 2002) or a 5′,3′-diphosphate.

[0111] As set forth herein, the terminal structure of dsRNAs of this disclosure that decrease expression of one or more ERBB family genes by, for example, RNAi may either have blunt ends or one or more overhangs. In certain embodiments, the overhang may be at the 3′-end or the 5′-end. The total length of dsRNAs having overhangs is expressed as the sum of the length of the paired double-stranded portion together with the overhanging nucleotides. For example, if a 19 base pair dsRNA has a two nucleotide overhang at both ends, the total length is expressed as 21-mer. Furthermore, since the overhanging sequence may have low specificity to one or more ERBB family gene, it is not necessarily complementary (antisense) or identical (sense) to an ERBB family gene sequence. In further embodiments, a dsRNA of this disclosure that decreases expression of one or more ERBB family gene by RNAi may further comprise a low molecular weight structure (e.g., a natural RNA molecule such as a tRNA, rRNA or viral RNA, or an artificial RNA molecule) at, for example, one or more overhanging portion of the dsRNA.

[0112] In further embodiments, a dsRNA molecule that decreases expression of one or more ERBB family gene by RNAi according to the instant disclosure may optionally comprise a 2′-sugar substitution, such as a 2′-deoxy, 2′-O-2-methoxyethyl, 2′-O-methoxyethyl, 2′-O-methyl, halogen, 2′-fluoro, 2′-O-allyl, or the like, or any combination thereof. In still further embodiments, a dsRNA molecule that decreases expression of one or more ERBB family gene by RNAi according to the instant disclosure further comprises a terminal cap substituent on one or both ends of the first strand or one or more second strands, such as an alkyl, abasic, deoxy abasic, glyceryl, dinucleotide, acyclic nucleotide, inverted deoxynucleotide moiety, or any combination thereof. In certain embodiments, at least one or two 5′-terminal ribonucleotides of the sense strand within the double-stranded region have a 2′-sugar substitution. In certain other embodiments, at least one or two 5′-terminal ribonucleotides of the antisense strand within the double-stranded region have a 2′-sugar substitution. In certain embodiments, at least one or two 5′-terminal ribonucleotides of the sense strand and the antisense strand within the double-stranded region have a 2′-sugar substitution.

[0113] In other embodiments, a dsRNA molecule that decreases expression of one or more target gene by RNAi according to the instant disclosure comprises one or more substitutions in the sugar backbone, including any combination of ribosyl, 2′-deoxyribosyl, a tetrofuranosyl (e.g., L-α-threofuranosyl), a hexopyranosyl (e.g., β-allopyranosyl, β-altropyranosyl, and β-glucopyranosyl), a pentopyranosyl (e.g., β-ribopyranosyl, α-lyxopyranosyl, β-xylopyranosyl, and α-arabinopyranosyl), a carbocyclic (carbon only ring) analog, a pyranose, a furanose, a morpholino, or analogs or derivatives thereof.

[0114] In yet other embodiments, a dsRNA molecule that decreases expression of one or more ERBB family gene by RNAi according to the instant disclosure further comprises at least one modified internucleoside linkage, such as independently a phosphorothioate, chiral phosphorothioate, phosphorodithioate, phosphotriester, aminoalkylphosphotriester, methyl phosphonate, alkyl phosphonate, 3′-alkylene phosphonate, 5′-alkylene phosphonate, chiral phosphonate, phosphonoacetate, thiophosphonoacetate, phosphinate, phosphoramidate, 3′-amino phosphoramidate, aminoalkylphosphoramidate, thionophosphoramidate, selenophosphate, thionoalkylphosphonate, thionoalkylphosphotriester, boranophosphate linkage, or any combination thereof.

[0115] A modified internucleotide linkage, as described herein, can be present in one or more strands of a dsRNA molecule of this disclosure, for example, in the sense strand, the antisense strand, both strands, or a plurality of strands (e.g., in an mdRNA). The dsRNA molecules of this disclosure can comprise one or more modified internucleotide linkages at the 3′-end, the 5′-end, or both of the 3′- and 5′-ends of the sense strand or the antisense strand or both strands. In one embodiment, a dsRNA molecule capable of decreasing expression of one or more ERBB family gene by RNAi has one modified internucleotide linkage at the 3′-end, such as a phosphorothioate linkage. For example, this disclosure provides a dsRNA molecule capable of decreasing expression of one or more ERBB family gene by RNAi having about 1 to about 8 or more phosphorothioate internucleotide linkages in one dsRNA strand. In yet another embodiment, this disclosure provides a dsRNA molecule capable of decreasing expression of one or more ERBB family gene by RNAi having about 1 to about 8 or more phosphorothioate internucleotide linkages in both dsRNA strands. In other embodiments, an exemplary dsRNA molecule of this disclosure can comprise from about 1 to about 5 or more consecutive phosphorothioate internucleotide linkages at the 5′-end of the sense strand, the antisense strand, both strands, or a plurality of strands. In another example, an exemplary dsRNA molecule of this disclosure can comprise one or more pyrimidine phosphorothioate internucleotide linkages in the sense strand, the antisense strand, two strands, or a plurality of strands. In yet another example, an exemplary dsRNA molecule of this disclosure can comprise one or more purine phosphorothioate internucleotide linkages in the sense strand, the antisense strand, two strands, or a plurality of strands.

[0116] Many exemplary modified nucleotide bases or analogs thereof useful in the dsRNA of the instant disclosure include 5-methylcytosine; 5-hydroxymethylcytosine; xanthine; hypoxanthine; 2-aminoadenine; 6-methyl, 2-propyl, or other alkyl derivatives of adenine and guanine; 8-substituted adenines and guanines (such as 8-aza, 8-halo, 8-amino, 8-thiol, 8-thioalkyl, 8-hydroxyl, or the like); 7-methyl, 7-deaza, and 3-deaza adenines and guanines; 2-thiouracil; 2-thiothymine; 2-thiocytosine; 5-methyl, 5-propynyl, 5-halo (such as 5-bromo or 5-fluoro), 5-trifluoromethyl, or other 5-substituted uracils and cytosines; and 6-azouracil. Further useful nucleotide bases can be found in Kurreck, Eur. J. Biochem. 270:1628, 2003; Herdewijn, Antisense Nucleic Acid Develop. 10:297, 2000; Concise Encyclopedia of Polymer Science and Engineering, pages 858-859, Kroschwitz, J. I., ed. John Wiley & Sons, 1990; U.S. Pat. No. 3,687,808, and similar references.

[0117] Certain nucleotide base moieties are particularly useful for increasing the binding affinity of the dsRNA molecules of this disclosure to complementary targets. These include 5-substituted pyrimidines; 6-azapyrimidines; and N-2, N-6, or O-6 substituted purines (including 2-aminopropyladenine, 5-propynyluracil and 5-propynylcytosine). For example, 5-methyluridine and 5-methylcytosine substitutions are known to increase nucleic acid duplex stability, which can be combined with 2′-sugar modifications (such as 2′-methoxy or 2′-methoxyethyl) or internucleoside linkages (e.g., phosphorothioate) that provide nuclease resistance to the modified or substituted dsRNA.

[0118] In another aspect of the instant disclosure, there is provided a dsRNA that decreases expression of one or more ERBB family gene, comprising a first strand that is complementary to an ERBB mRNA as set forth in SEQ ID NO:1158, 1159, 1160, 1161, 1162, 1163, 1164, 1165, or 1166 and a second strand that is complementary to the first strand, wherein the first and second strands form a double-stranded region of about 15 to about 40 base pairs and wherein at least one pyrimidine of the dsRNA is a pyrimidine nucleoside according to Formula I or II:

[chemical structure]

wherein R¹ and R² are each independently a —H, —OH, —OCH₃, —OCH₂OCH₂CH₃, —OCH₂CH₂OCH₃, halogen, substituted or unsubstituted C₁-C₁₀ alkyl, alkoxy, alkoxyalkyl, hydroxyalkyl, carboxyalkyl, alkylsulfonylamino, aminoalkyl, dialkylamino, alkylaminoalkyl, dialkylaminoalkyl, haloalkyl, trifluoromethyl, cycloalkyl, (cycloalkyl)alkyl, substituted or unsubstituted C₂-C₁₀ alkenyl, substituted or unsubstituted —O-allyl, O—CH₂CH═CH₂, —O—CH═CHCH₃, substituted or unsubstituted C₂-C₁₀ alkynyl, carbamoyl, carbamyl, carboxy, carbonylamino, substituted or unsubstituted aryl, substituted or unsubstituted aralkyl, —NH₂, —NO₂, —C≡N, or heterocyclo group; R³ and R⁴ are each independently a hydroxyl, a protected hydroxyl, or an internucleoside linking group; and R⁵ and R⁸ are each independently O or S. In certain embodiments, at least one nucleoside is according to Formula I in which R¹ is methyl and R² is —OH, or R¹ is methyl, R² is —OH, and R⁸ is S. In other embodiments, the internucleoside linking group covalently links from about 2 to about 40 nucleosides.

[0119] In certain embodiments, the first and one or more second strands of a dsRNA, which decreases expression of one or more ERBB family gene by RNAi and has at least one pyrimidine substituted with a pyrimidine nucleoside according to Formula I or II, can anneal or hybridize together (i.e., due to complementarity between the strands) to form at least one double-stranded region having a length or a combined length of about 15 to about 40 base pairs. In some embodiments, the dsRNA has at least one double-stranded region ranging in length from about 4 base pairs to about 10 base pairs or about 5 to about 13 base pairs or about 15 to about 25 base pairs or about 19 to about 23 base pairs. In other embodiments, the dsRNA has at least one double-stranded region ranging in length from about 26 to about 40 base pairs or about 27 to about 30 base pairs or about 30 to about 35 base pairs. In certain embodiments, the dsRNA molecule or analog thereof has an overhang of one to four nucleotides on one or both 3′-ends, such as an overhang comprising a deoxyribonucleotide or two deoxyribonucleotides (e.g., thymidine). In some embodiments, dsRNA molecule or analog thereof has a blunt end at one or both ends of the dsRNA. In certain embodiments, the 5′-end of the first or second strand is phosphorylated.

[0120] In certain embodiments, at least one R¹ is a C₁-C₅ alkyl, such as methyl or ethyl. Within other exemplary embodiments of this disclosure, compounds of Formula I are a 5-alkyluridine (i.e., R¹ is alkyl, R² is —OH, and R³, R⁴, and R⁵ are as defined herein) or compounds of Formula II are a 5-alkylcytidine (i.e., R¹ is alkyl, R² is —OH, and R³, R⁴, and R⁵ are as defined herein). In related embodiments, the 5-alkyluridine is a 5-methyluridine (also referred to as ribothymidine or ‘t’ or ‘T^{r}’ i.e., R¹ is methyl and R² is —OH), and the 5-alkylcytidine is a 5-methylcytidine. In other embodiments, at least one, at least three, or all uridines of the first strand of the dsRNA are 5-methyluridine, or at least one, at least three, or all uridines of the second strand of the dsRNA are 5-methyluridine, or any combination thereof (e.g., such changes are made on both strands). In further embodiments, the 5-methyluridine may further have a 2′-O-methyl. In certain embodiments, at least one pyrimidine nucleoside of Formula I or Formula II has an R⁵ that is S.

[0121] In further embodiments, at least one pyrimidine nucleoside of the dsRNA is a locked nucleic acid (LNA) in the form of a bicyclic sugar, wherein R² is oxygen, and the 2′-O and 4′-C form an oxymethylene bridge on the same ribose ring. In a related embodiment, the LNA comprises a base substitution, such as a 5-methyluridine LNA or 2-thio-5-methyluridine LNA. In other embodiments, at least one, at least three, or all uridines of the first strand of the dsRNA are replaced with 5-methyluridine or 2-thioribothymidine or 5-methyluridine LNA or 2-thio-5-methyluridine LNA, or at least one, at least three, or all uridines of the second strand of the dsRNA are replaced with 5-methyluridine, 2-thioribothymidine, 5-methyluridine LNA, 2-thio-5-methyluridine LNA, or any combination thereof (e.g., such changes are made on both strands, or some substitutions include 5-methyluridine only, 2-thioribothymidine only, 5-methyluridine LNA only, 2-thio-5-methyluridine LNA only, or one or more 2-thioribothymidine or 5-methyluridine with one or more 5-methyluridine LNA or 2-thio-5-methyluridine LNA).

[0122] In further embodiments, a ribose of the pyrimidine nucleoside or the internucleoside linkage can be optionally modified. For example, compounds of Formula I or II are provided wherein R² is alkoxy, such as a 2′-O-methyl substitution (e.g., which may be in addition to a 5-alkyluridine or a 5-alkylcytidine, respectively). In certain embodiments, R² is selected from 2′-O-(C₁-C₅) alkyl, 2′-O-methyl, 2′-OCH₂OCH₂CH₃, 2′-OCH₂CH₂OCH₃, 2′-O-allyl, or fluoro. In further embodiments, one or more of the pyrimidine nucleosides are according to Formula I in which R¹ is methyl and R² is a 2′-O-(C₁-C₅) alkyl (e.g., 2′-O-methyl). In other embodiments, one or more, or at least two, pyrimidine nucleosides according to Formula I or II have an R² that is not —H or —OH and is incorporated at a 3′-end or 5′-end and not within the gap of one or more strands within the double-stranded region of the dsRNA molecule.

[0123] In further embodiments, a dsRNA molecule or analog thereof comprising a pyrimidine nucleoside according to Formula I or Formula II in which R² is not —H or —OH and an overhang, further comprises at least two of pyrimidine nucleosides that are incorporated either at a 3′-end or a 5′-end or both of one strand or two strands within the double-stranded region of the dsRNA molecule. In a related embodiment, at least one of the at least two pyrimidine nucleosides in which R² is not —H or —OH is located at a 3′-end or a 5′-end within the double-stranded region of at least one strand of the dsRNA molecule, and wherein at least one of the at least two pyrimidine nucleosides in which R² is not —H or —OH is located internally within a strand of the dsRNA molecule. In still further embodiments, a dsRNA molecule or analog thereof that has an overhang has a first of the two or more pyrimidine nucleosides in which R² is not —H or —OH that is incorporated at a 5′-end within the double-stranded region of the sense strand of the dsRNA molecule and a second of the two or more pyrimidine nucleosides is incorporated at a 5′-end within the double-stranded region of the antisense strand of the dsRNA molecule. In any of these embodiments, one or more substituted or modified nucleotides can be a G clamp (e.g., a cytosine analog that forms an additional hydrogen bond to guanine, such as 9-(aminoethoxy)phenoxazine; see, e.g., Lin and Mateucci, 1998). In any of these embodiments, provided the one or more modified pyrimidine nucleosides are not within the gap.

[0124] In yet other embodiments, a dsRNA molecule of Formula I or II according to the instant disclosure that has an overhang comprises four or more independent pyrimidine nucleosides or four or more independent pyrimidine nucleosides in which R² is not —H or —OH, wherein (a) a first pyrimidine nucleoside is incorporated into a 3′-end within the double-stranded region of the sense (second) strand of the dsRNA, (b) a second pyrimidine nucleoside is incorporated into a 5′-end within the double-stranded region of the sense (second) strand, (c) a third pyrimidine nucleoside is incorporated into a 3′-end within the double-stranded region of the antisense (first) strand of the dsRNA, and (d) a fourth pyrimidine nucleoside is incorporated into a 5′-end within the double-stranded region of the antisense (first) strand. In any of these embodiments, provided the one or more pyrimidine nucleosides are not within the gap. In further embodiments, a dsRNA molecule or analog thereof comprising a pyrimidine nucleoside according to Formula I or Formula II in which R² is not —H or —OH and is blunt-ended, further comprises at least two of pyrimidine nucleosides that are incorporated either at a 3′-end or a 5′-end or both of one strand or two strands of the dsRNA molecule. In a related embodiment, at least one of the at least two pyrimidine nucleosides in which R² is not —H or —OH is located at a 3′-end or a 5′-end of at least one strand of the dsRNA molecule, and wherein at least one of the at least two pyrimidine nucleosides in which R² is not —H or —OH is located internally within a strand of the dsRNA molecule. In still further embodiments, a dsRNA molecule or analog thereof that is blunt-ended has a first of the two or more pyrimidine nucleosides in which R² is not —H or —OH that is incorporated at a 5′-end of the sense strand of the dsRNA molecule and a second of the two or more pyrimidine nucleosides is incorporated at a 5′-end of the antisense strand of the dsRNA molecule. In any of these embodiments, provided the one or more pyrimidine nucleosides are not within the gap.

[0125] In yet other embodiments, a dsRNA molecule comprising a pyrimidine nucleoside according to Formula I or Formula II and that is blunt-ended comprises four or more independent pyrimidine nucleosides or four or more independent pyrimidine nucleosides in which R² is not —H or —OH, wherein (a) a first pyrimidine nucleoside is incorporated into a 3′-end within the double-stranded region of the sense (second) strand of the dsRNA, (b) a second pyrimidine nucleoside is incorporated into a 5′-end within the double-stranded region of the sense (second) strand, (c) a third pyrimidine nucleoside is incorporated into a 3′-end within the double-stranded region of the antisense (first) strand of the dsRNA, and (d) a fourth pyrimidine nucleoside is incorporated into a 5′-end within the double-stranded region of the antisense (first) strand. In any of these embodiments, provided the one or more pyrimidine nucleosides are not within the gap.

[0126] In still further embodiments, a dsRNA molecule or analog thereof of Formula I or II according to the instant disclosure further comprises a terminal cap substituent on one or both ends of the first strand or second strand, such as an alkyl, abasic, deoxy abasic, glyceryl, dinucleotide, acyclic nucleotide, inverted deoxynucleotide moiety, or any combination thereof. In further embodiments, one or more internucleoside linkage can be optionally modified. For example, a dsRNA molecule or analog thereof of Formula I or II according to the instant disclosure wherein at least one internucleoside linkage is modified to a phosphorothioate, chiral phosphorothioate, phosphorodithioate, phosphotriester, aminoalkylphosphotriester, methyl phosphonate, alkyl phosphonate, 3′-alkylene phosphonate, 5′-alkylene phosphonate, chiral phosphonate, phosphonoacetate, thiophosphonoacetate, phosphinate, phosphoramidate, 3′-amino phosphoramidate, aminoalkylphosphoramidate, thionophosphoramidate, selenophosphate, thionoalkylphosphonate, thionoalkylphosphotriester, boranophosphate linkage, or any combination thereof.

[0127] In still another embodiment, provided is a nicked or gapped dsRNA molecule (ndsRNA or gdsRNA, respectively) that decreases expression of one or more ERBB family genes by RNAi, which comprises a first strand that is complementary to an ERBB mRNA as set forth in SEQ ID NO:1158, 1159, 1160, 1161, 1162, 1163, 1164, 1165, or 1166, and two or more second strands that are complementary to the first strand, wherein the first and at least one of the second strands optionally form a non-overlapping double-stranded region of about 5 to 13 base pairs. Any of the aforementioned substitutions or modifications is contemplated within this embodiment as well.

[0128] In another exemplary of this disclosure, the dsRNAs comprise at least two or more substituted pyrimidine nucleosides can each be independently selected wherein R¹ comprises any chemical modification or substitution as contemplated herein, for example an alkyl (e.g., methyl), halogen, hydroxy, alkoxy, nitro, amino, trifluoromethyl, cycloalkyl, (cycloalkyl)alkyl, alkanoyl, alkanoyloxy, aryl, aroyl, aralkyl, nitrile, dialkylamino, alkenyl, alkynyl, hydroxyalkyl, aminoalkyl, alkylaminoalkyl, dialkylaminoalkyl, haloalkyl, carboxyalkyl, alkoxyalkyl, carboxy, carbonyl, alkanoylamino, carbamoyl, carbonylamino, alkylsulfonylamino, or heterocyclo group. When two or more modified ribonucleotides are present, each modified ribonucleotide can be independently modified to have the same, or different, modification or substitution at R¹ or R².

[0129] In other detailed embodiments, one or more substituted pyrimidine nucleosides according to Formula I or II can be located at any ribonucleotide position, or any combination of ribonucleotide positions, on either or both of the sense and antisense strands of a dsRNA molecule of this disclosure, including at one or more multiple terminal positions as noted above, or at any one or combination of multiple non-terminal (“internal”) positions. In this regard, each of the sense and antisense strands can incorporate about 1 to about 6 or more of the substituted pyrimidine nucleosides.

[0130] In certain embodiments, when two or more substituted pyrimidine nucleosides are incorporated within a dsRNA of this disclosure, at least one of the substituted pyrimidine nucleosides will be at a 3′- or 5′-end of one or both strands, and in certain embodiments at least one of the substituted pyrimidine nucleosides will be at a 5′-end of one or both strands. In other embodiments, the substituted pyrimidine nucleosides are located at a position corresponding to a position of a pyrimidine in an unmodified dsRNA that is constructed as a homologous sequence for targeting a cognate mRNA, as described herein.

[0131] In addition, the terminal structure of the dsRNAs of this disclosure may have a stem-loop structure in which ends of one side of the dsRNA molecule are connected by a linker nucleic acid, e.g., a linker RNA. The length of the double-stranded region (stem-loop portion) can be, for example, about 15 to about 49 bp, about 15 to about 35 bp, or about 21 to about 30 by long. Alternatively, the length of the double-stranded region that is a final transcription product of dsRNAs to be expressed in a target cell may be, for example, approximately about 15 to about 49 bp, about 15 to about 35 bp, or about 21 to about 30 by long. When linker segments are employed, there is no particular limitation in the length of the linker as long as it does not hinder pairing of the stem portion. For example, for stable pairing of the stem portion and suppression of recombination between DNAs coding for this portion, the linker portion may have a clover-leaf tRNA structure. Even if the linker has a length that would hinder pairing of the stem portion, it is possible, for example, to construct the linker portion to include introns so that the introns are excised during processing of a precursor RNA into mature RNA, thereby allowing pairing of the stem portion. In the case of a stem-loop dsRNA, either end (head or tail) of RNA with no loop structure may have a low molecular weight RNA. As described above, these low molecular weight RNAs may include a natural RNA molecule, such as tRNA, rRNA or viral RNA, or an artificial RNA molecule.

[0132] A dsRNA molecule may be comprised of a circular nucleic acid molecule, wherein the dsRNA is about 38 to about 70 nucleotides in length having from about 18 to about 23 (e.g., about 19 to about 21) base pairs wherein the circular oligonucleotide forms a dumbbell shaped structure having about 19 base pairs and 2 loops. In certain embodiments, a circular dsRNA molecule contains two loop motifs, wherein one or both loop portions of the dsRNA molecule is biodegradable. For example, a circular dsRNA molecule of this disclosure is designed such that degradation of the loop portions of the dsRNA molecule in vivo can generate a double-stranded dsRNA molecule with 3′-terminal overhangs, such as 3′-terminal nucleotide overhangs comprising from about 1 to about 4 (unpaired) nucleotides.

[0133] Substituting or modifying nucleosides of a dsRNA according to this disclosure can result in increased resistance to enzymatic degradation, such as exonucleolytic degradation, including 5′-exonucleolytic or 3′-exonucleolytic degradation. As such, in some embodiments, the dsRNAs described herein will exhibit significant resistance to enzymatic degradation compared to a corresponding dsRNA having standard nucleotides, and will thereby possess greater stability, increased half-life, and greater bioavailability in physiological environments (e.g., when introduced into a target cell). In addition to increasing resistance of the substituted or modified dsRNAs to exonucleolytic degradation, the incorporation of one or more pyrimidine nucleosides according to Formula I or II can render dsRNAs more resistant to other enzymatic or chemical degradation processes and thus more stable and bioavailable than otherwise identical dsRNAs that do not include the substitutions or modifications. In related aspects of this disclosure, dsRNA substitutions or modifications described herein will often improve stability of a modified dsRNA for use within research, diagnostic and treatment methods wherein the modified dsRNA is contacted with a biological sample, e.g., a mammalian cell, intracellular compartment, serum or other extracellular fluid, tissue, or other in vitro or in vivo physiological compartment or environment. In one embodiment, diagnosis is performed on an isolated biological sample. In another embodiment, the diagnostic method is performed in vitro. In a further embodiment, the diagnostic method is not performed (directly) on a human or animal body.

[0134] In addition to increasing stability of substituted or modified dsRNAs, incorporation of one or more pyrimidine nucleosides according to Formula I or II in a dsRNA designed for gene silencing can provide additional desired functional results, including increasing a melting point of a substituted or modified dsRNA compared to a corresponding unmodified dsRNA. In another aspect of this disclosure, certain substitutions or modifications of dsRNAs described herein can reduce “off-target effects” of the substituted or modified dsRNA molecules when they are contacted with a biological sample (e.g., when introduced into a target eukaryotic cell having specific, and non-specific mRNA species present as potential specific and non-specific targets). In yet another aspect of this disclosure, the dsRNA substitutions or modifications described herein can reduce interferon activation by the dsRNA molecule when the dsRNA is contacted with a biological sample, e.g., when introduced into a eukaryotic cell.

[0135] In further embodiments, dsRNAs of this disclosure can comprise one or more sense (second) strand that is homologous or corresponds to a sequence of a target gene (e.g., an EGFR, ERBB2, ERBB3, ERBB4) and an antisense (first) strand that is complementary to the sense strand and a sequence of the target gene. In exemplary embodiments, at least one strand of the dsRNA incorporates one or more pyrimidines substituted according to Formula I or II (e.g., wherein the pyrimidine is more than one 5-methyluridine, 2-thioribothymidine, 2′-O-methyl-5-methyluridine or an LNA, the ribose is modified to incorporate a 2′-alkyl substitution, or any combination thereof). These and other multiple substitutions or modifications according to Formula I or II can be introduced into one or more pyrimidines, or into any combination and up to all pyrimidines present in one or all strands of a dsRNA, so long as the dsRNA has or retains RNAi activity similar to or better than the activity of an unmodified dsRNA.

[0136] In any of the embodiments described herein, the dsRNA may include multiple modifications. For example, a dsRNA having at least one ribothymidine or 2′-O-methyl-5-methyluridine may further comprise at least one LNA, 2′-methoxy, 2′-fluoro, 2′-deoxy, phosphorothioate linkage, an inverted base terminal cap, or any combination thereof. In certain embodiments, a dsRNA will have from one to all ribothymidines and have up to 75% LNA. In other embodiments, a dsRNA will have from one to all ribothymidines and have up to 75% 2′-methoxy (e.g., not at the Argonaute cleavage site). In still other embodiments, a dsRNA will have from one to all ribothymidines and have up to 100% 2′-fluoro. In further embodiments, a dsRNA will have from one to all ribothymidines and have up to 75% 2′-deoxy. In further embodiments, a dsRNA will have up to 75% LNA and have up to 75% 2′-methoxy. In still other embodiments, a dsRNA will have up to 75% LNA and have up to 100% 2′-fluoro. In further embodiments, a dsRNA will have up to 75% LNA and have up to 75% 2′-deoxy. In other embodiments, a dsRNA will have up to 75% 2′-methoxy and have up to 100% 2′-fluoro. In more embodiments, a dsRNA will have up to 75% 2′-methoxy and have up to 75% 2′-deoxy. In further embodiments, a dsRNA will have up to 100% 2′-fluoro and have up to 75% 2′-deoxy.

[0137] In further multiple modification embodiments, a dsRNA will have from one to all ribothymidines, up to 75% LNA, and up to 75% 2′-methoxy. In still further embodiments, a dsRNA will have from one to all ribothymidines, up to 75% LNA, and up to 100% 2′-fluoro. In further embodiments, a dsRNA will have from one to all ribothymidines, up to 75% LNA, and up to about 75% 2′-deoxy. In further embodiments, a dsRNA will have from one to all ribothymidines, up to 75% 2′-methoxy, and up to 75% 2′-fluoro. In further embodiments, a dsRNA will have from one to all ribothymidines, up to 75% 2′-methoxy, and up to 75% 2′-deoxy. In further embodiments, a dsRNA will have from one to all ribothymidines, up to 100% 2′-fluoro, and up to 75% 2′-deoxy. In yet further embodiments, a dsRNA will have from one to all ribothymidines, up to 75% LNA substitutions, up to 75% 2′-methoxy, up to 100% 2′-fluoro, and up to 75% 2′-deoxy. In other embodiments, a dsRNA will have up to 75% LNA, up to 75% 2′-methoxy, and up to 100% 2′-fluoro. In further embodiments, a dsRNA will have up to 75% LNA, up to 75% 2′-methoxy, and up to about 75% 2′-deoxy. In further embodiments, a dsRNA will have up to 75% LNA, up to 100% 2′-fluoro, and up to 75% 2′-deoxy. In still further embodiments, a dsRNA will have up to 75% 2′-methoxy, up to 100% 2′-fluoro, and up to 75% 2′-deoxy.

[0138] In any of these exemplary methods for using multiply modified dsRNA, the dsRNA may further comprise up to 100% phosphorothioate internucleoside linkages, from one to ten or more inverted base terminal caps, or any combination thereof. Additionally, any of these dsRNA may have these multiple modifications on one strand, two strands, three strands, a plurality of strands, or all strands, or on the same or different nucleoside within a dsRNA molecule. Finally, in any of these multiple modification dsRNA, the dsRNA must have gene silencing activity.

[0139] Within certain aspects, the present disclosure provides dsRNA that decreases expression of one or more ERBB family gene by RNAi, and compositions comprising one or more dsRNA, wherein at least one dsRNA comprises one or more universal-binding nucleotide(s) in the first, second or third position in the anti-codon of the antisense strand of the dsRNA duplex and wherein the dsRNA is capable of specifically binding to one or more ERBB family sequence, such as an RNA expressed by a target cell. In cases in which the sequence of a target ERBB RNA includes one or more single nucleotide substitution, dsRNA comprising a universal-binding nucleotide retains its capacity to specifically bind a target ERBB RNA, thereby mediating gene silencing and, as a consequence, preventing escape of the target ERBB from dsRNA-mediated gene silencing. Non-limiting examples of universal-binding nucleotides that may be suitably employed in the compositions and methods disclosed herein include inosine, 1-β-D-ribofuranosyl-5-nitroindole, and 1-β-D-ribofuranosyl-3-nitropyrrole.

[0140] In certain aspects, dsRNA disclosed herein can include from about one universal-binding nucleotide to about 10 universal-binding nucleotides. Within other aspects, the presently disclosed dsRNA may comprise a sense strand that is homologous to a sequence of one or more ERBB family gene and an antisense strand that is complementary to the sense strand, with the proviso that at least one nucleotide of the antisense strand of the otherwise complementary dsRNA duplex has one or more universal-binding nucleotide.

### Synthesis of Nucleic Acid Molecules

[0141] Exemplary molecules of the instant disclosure are recombinantly produced, chemically synthesized, or a combination thereof. Oligonucleotides (e.g., certain modified oligonucleotides or portions of oligonucleotides lacking ribonucleotides) are synthesized using protocols known in the art, for example as described in Caruthers et al., Methods in Enzymol. 211:3, 1992; PCT Publication No. WO 99/54459, Wincott et al., Nucleic Acids Res. 23:2677, 1995; Wincott et al., Methods Mol. Bio. 74:59, 1997; Brennan et al., Biotechnol. Bioeng. 61:33, 1998; and U.S. Pat. No. 6,001,311. Synthesis of RNA, including certain dsRNA molecules of this disclosure can be made using procedures described in, e.g., Usman et al., J. Am. Chem. Soc. 109:7845, 1987; Scaringe et al., Nucleic Acids Res. 18:5433, 1990; and Wincott et al., 1995; Wincott et al., 1997. In certain embodiments, the nucleic acid molecules of this disclosure can be synthesized separately and joined together post-synthetically, e.g., by ligation (Moore et al., Science 256:9923, 1992; PCT Publication No. WO 93/23569; Shabarova et al., Nucleic Acids Res. 19:4247, 1991; Bellon et al., Nucleosides & Nucleotides 16:951, 1997; Bellon et al., Bioconjugate Chem. 8:204, 1997), or by hybridization following synthesis or deprotection.

[0142] In further embodiments, dsRNAs of this disclosure that decrease expression of one or more ERBB family gene by RNAi can be made as single or multiple transcription products expressed by a polynucleotide vector encoding the single or multiple dsRNAs and directing their expression within host cells. In these embodiments the double-stranded portion of a final transcription product of the dsRNAs to be expressed within the target cell can be, for example, about 5 to 40 bp, about 15 to 24 bp, or about 25 to 40 by long. Within exemplary embodiments, double-stranded portions of dsRNAs, in which two or more strands pair up, are not limited to completely paired nucleotide segments, and may contain non-pairing portions due to a mismatch (the corresponding nucleotides are not complementary), bulge (lacking in the corresponding complementary nucleotide on one strand), overhang, and the like. Non-pairing portions can be contained to the extent that they do not interfere with dsRNA formation. In more detailed embodiments, a “bulge” may comprise 1 to 4 non-pairing nucleotides, and the double-stranded region of dsRNAs in which two strands pair up may contain from about 1 to about 7 or about 1 to about 5 bulges. In addition, “mismatch” portions contained in the double-stranded region of dsRNAs may be present in numbers from about 1 to about 7 or about 1 to about 5 or about 1 to about 3. In other embodiments, the double-stranded region of dsRNAs of this disclosure may contain both bulge and mismatched portions as described herein.

[0143] A dsRNA or analog thereof of this disclosure may be further comprised of a nucleotide, non-nucleotide, or mixed nucleotide/non-nucleotide linker that joins the sense region of the dsRNA to the antisense region of the dsRNA. In one embodiment, a nucleotide linker can be a linker of more than about 2 nucleotides length up to about 10 nucleotides in length. In another embodiment, the nucleotide linker can be a nucleic acid aptamer. By “aptamer” or “nucleic acid aptamer” as used herein is meant a nucleic acid molecule that binds specifically to a target molecule wherein the nucleic acid molecule has sequence that comprises a sequence recognized by the target molecule in its natural setting. Alternately, an aptamer can be a nucleic acid molecule that binds to a target molecule wherein the target molecule does not naturally bind to a nucleic acid. The target molecule can be any molecule of interest. For example, the aptamer can be used to bind to a ligand-binding domain of a protein, thereby preventing interaction of the naturally occurring ligand with the protein. Similar techniques generally known in the art include, for example, Gold et al., Annu. Rev. Biochem. 64:763, 1995; Brody and Gold, J. Biotechnol. 74:5, 2000; Sun, Curr. Opin. Mol. Ther. 2:100, 2000; Kusser, J. Biotechnol. 74:27, 2000; Hermann and Patel, Science 287:820, 2000; and Jayasena, Clinical Chem. 45:1628, 1999.

[0144] A non-nucleotide linker may be comprised of an abasic nucleotide, polyether, polyamine, polyamide, peptide, carbohydrate, lipid, polyhydrocarbon, or other polymeric compounds (e.g., polyethylene glycols such as those having between 2 and 100 ethylene glycol units). Specific examples include those described by Seela and Kaiser, Nucleic Acids Res. 18:6353, 1990, and Nucleic Acids Res. 15:3113, 1987; Cload and Schepartz, J. Am. Chem. Soc. 113:6324, 1991; Richardson and Schepartz, J. Am. Chem. Soc. 113:5109, 1991; Ma et al., Nucleic Acids Res. 21:2585, 1993, and Biochemistry 32:1751, 1993; Durand et al., Nucleic Acids Res. 18:6353, 1990; McCurdy et al., Nucleosides & Nucleotides 10:287, 1991; Jaschke et al., Tetrahedron Lett. 34:301, 1993; Ono et al., Biochemistry 30:9914, 1991; PCT Publication Nos. WO 89/02439, WO 95/06731, WO 95/11910; and Ferentz and Verdine, J. Am. Chem. Soc. 113:4000, 1991. The synthesis of a dsRNA molecule of this disclosure, which can be further modified, comprises: (a) synthesis of two complementary strands of the dsRNA molecule; and (b) annealing the two complementary strands together under conditions suitable to obtain a dsRNA molecule. In another embodiment, synthesis of the two complementary strands of a dsRNA molecule is by solid phase oligonucleotide synthesis. In yet another embodiment, synthesis of the two complementary strands of a dsRNA molecule is by solid phase tandem oligonucleotide synthesis.

[0145] Chemically synthesizing nucleic acid molecules with substitutions or modifications (base, sugar, phosphate, or any combination thereof) can prevent their degradation by serum ribonucleases, which may lead to increased potency. See, e.g., Eckstein et al., PCT Publication No. WO 92/07065; Perrault et al., Nature 344:565, 1990; Pieken et al., Science 253:314, 1991; Usman and Cedergren, Trends in Biochem. Sci. 17:334, 1992; Usman et al., Nucleic Acids Symp. Ser. 31:163, 1994; Beigelman et al., J. Biol. Chem. 270:25702, 1995; Burgin et al., Biochemistry 35:14090, 1996; Burlina et al., Bioorg. Med. Chem. 5:1999, 1997; Thompson et al., Karpeisky et al., Tetrahedron Lett. 39:1131, 1998; Earnshaw and Gait, Biopolymers (Nucleic Acid Sciences) 48:39-55, 1998; Verma and Eckstein, Annu. Rev. Biochem. 67:99-134, 1998; Herdewijn, Antisense Nucleic Acid Drug Dev. 10:297, 2000; Kurreck, Eur. J. Biochem. 270:1628, 2003; Dorsett and Tuschl, Nature Rev. Drug Discov. 3:318, 2004; PCT Publication Nos. WO 91/03162; WO 93/15187; WO 97/26270; WO 98/13526; U.S. Pat. Nos. 5,334,711; 5,627,053; 5,716,824; 5,767,264; 6,300,074. Each of the above references discloses various substitutions and chemical modifications to the base, phosphate, or sugar moieties of nucleic acid molecules, which can be used in the dsRNAs described herein. For example, oligonucleotides can be modified at the sugar moiety to enhance stability or prolong biological activity by increasing nuclease resistance. Representative sugar modifications include 2′-amino, 2′-C-allyl, 2′-fluoro, 2′-O-methyl, 2′-O-allyl, or 2′-H. Other modifications to enhance stability or prolong biological activity can be internucleoside linkages, such as phosphorothioate, or base-modifications, such as locked nucleic acids (see, e.g., U.S. Pat. Nos. 6,670,461; 6,794,499; 6,268,490), or 5-methyluridine or 2′-O-methyl-5-methyluridine in place of uridine (see, e.g., U.S. Patent Application Publication No. 2006/0142230). Hence, dsRNA molecules of the instant disclosure can be modified to increase nuclease resistance or duplex stability while substantially retaining or having enhanced RNAi activity as compared to unmodified dsRNA.

[0146] In one embodiment, this disclosure features substituted or modified dsRNA molecules, such as phosphate backbone modifications comprising one or more phosphorothioate, phosphorodithioate, methylphosphonate, phosphotriester, morpholino, amidate carbamate, carboxymethyl, acetamidate, polyamide, sulfonate, sulfonamide, sulfamate, formacetal, thioformacetal, or alkylsilyl, substitutions. For a review of oligonucleotide backbone modifications, see Hunziker and Leumann, Nucleic Acid Analogues: Synthesis and Properties, in Modern Synthetic Methods, VCH, 331-417, 1995; and Mesmaeker et al., ACS, 24-39, 1994.

[0147] In another embodiment, a conjugate molecule can be optionally attached to a dsRNA or analog thereof that decreases expression of one or more ERBB family gene by RNAi. For example, such conjugate molecules may be polyethylene glycol, human serum albumin, or a ligand for a cellular receptor that can, for example, mediate cellular uptake (e.g., HIV TAT, see Vocero-Akbani et al., Nature Med. 5:23, 1999; see also U.S. Patent Application Publication No. 2004/0132161). Examples of specific conjugate molecules contemplated by the instant disclosure that can be attached to a dsRNA or analog thereof of this disclosure are described in U.S. Patent Application Publication Nos. 2003/0130186 and 2004/0110296. In another embodiment, a conjugate molecule is covalently attached to a dsRNA or analog thereof that decreases expression of one or more ERBB family gene by RNAi via a biodegradable linker. In certain embodiments, a conjugate molecule can be attached at the 3′-end of either the sense strand, the antisense strand, or both strands of a dsRNA molecule provided herein. In another embodiment, a conjugate molecule can be attached at the 5′-end of either the sense strand, the antisense strand, or both strands of the dsRNA or analog thereof. In yet another embodiment, a conjugate molecule is attached both the 3′-end and 5′-end of either the sense strand, the antisense strand, or both strands of a dsRNA molecule, or any combination thereof. In further embodiments, a conjugate molecule of this disclosure comprises a molecule that facilitates delivery of a dsRNA or analog thereof into a biological system, such as a cell. The type of conjugates used and the extent of conjugation of dsRNA or analogs thereof of this disclosure can be evaluated for improved pharmacokinetic profiles, bioavailability, or stability while at the same time tested for the ability to mediate RNAi. As such, one skilled in the art can screen dsRNA or analogs thereof having various conjugates to determine whether the dsRNA-conjugate complex possesses improved properties while maintaining the ability to mediate RNAi, for example, in animal models described herein and generally known in the art.

Methods for Selecting dsRNA Molecules Specific for an ERBB Sequence

[0148] As indicated above, the present disclosure also provides methods for selecting dsRNA that are capable of specifically binding to one or more ERBB family genes while being incapable of specifically binding or minimally binding to non-ERBB genes. The selection process disclosed herein is useful, e.g., in eliminating dsRNAs analogs that are cytotoxic due to non-specific binding to, and subsequent degradation of, one or more non-ERBB genes.

[0149] Methods of the present disclosure do not require a priori knowledge of the nucleotide sequence of every possible gene variant targeted by the dsRNA or analog thereof. In one embodiment, the nucleotide sequence of the dsRNA is selected from a conserved region or consensus sequence of one or more ERBB family genes. In another embodiment, the dsRNA may be selectively or preferentially targeted to a certain sequence contained in an mRNA splice variant of one or more ERBB family genes.

[0150] In certain embodiments, methods are provided for selecting one or more dsRNA molecule that decreases expression of one or more ERBB family gene by RNAi, comprising a first strand that is complementary to an ERBB mRNA set forth in SEQ ID NO:1158, 1159, 1160, 1161, 1162, 1163, 1164, 1165, or 1166 and a second strand that is complementary to the first strand, wherein the first and second strands form a double-stranded region of about 15 to about 40 base pairs (e.g., ERBB sequences found in Table A of U.S. Application No. 60/932,970), and wherein at least one uridine of the dsRNA molecule is replaced with a 5-methyluridine or 2′-O-methyl-5-methyluridine, which methods employ “off-target” profiling whereby one or more dsRNA provided herein is contacted with a cell, either in vivo or in vitro, and total ERBB mRNA is collected for use in probing a microarray comprising oligonucleotides having one or more nucleotide sequence from a panel of known genes, including non-ERBB genes (e.g., interferon). The “off-target” profile of the dsRNA provided herein is quantified by determining the number of non-ERBB genes having reduced expression levels in the presence of the candidate dsRNAs. The existence of “off target” binding indicates a dsRNA provided herein that is capable of specifically binding to one or more non-ERBB gene messages. In certain embodiments, a dsRNA as provided herein (e.g., sequences of Table A) applicable to therapeutic use will exhibit a greater stability, minimal interferon response, and little or no “off-target” binding.

[0151] Still further embodiments provide methods for selecting more efficacious dsRNA by using one or more reporter gene constructs comprising a constitutive promoter, such as a cytomegalovirus (CMV) or phosphoglycerate kinase (PGK) promoter, operably fused to, and capable of altering the expression of one or more reporter genes, such as a luciferase, chloramphenicol (CAT), or β-galactosidase, which, in turn, is operably fused in-frame with a dsRNA (such as one having a length between about 15 base-pairs and about 40 base-pairs or from about 5 nucleotides to about 24 nucleotides, or about 25 nucleotides to about 40 nucleotides) that contains one or more ERBB family sequence, as provided herein.

[0152] Individual reporter gene expression constructs may be co-transfected with one or more dsRNA or analog thereof. The capacity of a given dsRNA to reduce the expression level of an ERBB gene may be determined by comparing the measured reporter gene activity in cells transfected with or without a dsRNA molecule of interest.

[0153] Certain embodiments disclosed herein provide methods for selecting one or more modified dsRNA molecule(s) by predicting the stability of a dsRNA duplex. In some embodiments, such a prediction is achieved by using a theoretical melting curve wherein a higher theoretical melting curve indicates an increase in dsRNA duplex stability and a concomitant decrease in cytotoxic effects. Alternatively, stability of a dsRNA duplex may be determined empirically by measuring hybridization of a single RNA analog strand as described herein to a complementary target gene within, for example, a polynucleotide array. The melting temperature (i.e., the Tₘ value) for each modified RNA and complementary RNA immobilized on the array can be determined A Tₘ is the temperature at which 50% of one strand is annealed to its complementary strand. From this Tₘ value, the relative stability of the modified RNA pairing with a complementary unmodified or modified RNA molecule can be measured.

[0154] For example, Kawase et al. (Nucleic Acids Res. 14:7727, 1986) have described an analysis of the nucleotide-pairing properties of Di (inosine) to A, C, G, and T, which was achieved by measuring the hybridization of oligonucleotides (ODNs) with Di in various positions to complementary sets of ODNs made as an array. The relative strength of nucleotide-pairing is I-C>I-A>I-G≈I-T. Generally, Di containing duplexes showed lower Tₘ values when compared to the corresponding wild type (WT) nucleotide pair. The stabilization of Di by pairing was in order of Dc>Da>Dg>Dt>Du. As a person of skill in the art would understand, although universal-binding nucleotides are used herein as an example of determining duplex stability (i.e., the Tₘ value), other nucleotide substitutions (e.g., 5-methyluridine for uridine) or further modifications (e.g., a ribose modification at the 2′-position) can also be evaluated by these or similar methods.

[0155] In still further embodiments of the presently disclosed methods, one or more anti-codon within an antisense strand of a dsRNA molecule or analog thereof is substituted with a universal-binding nucleotide in a second or third position in the anti-codon of the antisense strand. By substituting a universal-binding nucleotide for a first or second position, the one or more first or second position nucleotide-pair substitution allows the substituted dsRNA molecule to specifically bind to mRNA wherein a first or a second position nucleotide-pair substitution has occurred, wherein the one or more nucleotide-pair substitution results in an amino acid change in the corresponding gene product.

[0156] Any of these methods of identifying dsRNA of interest can also be used to examine a dsRNA that decreases expression of one or more ERBB family gene by RNA interference, comprising a first strand that is complementary to an ERBB mRNA set forth in SEQ ID NO:1158, 1159, 1160, 1161, 1162, 1163, 1164, 1165, or 1166, or any combination thereof and a second and third strand that have non-overlapping complementarity to the first strand, wherein the first and at least one of the second or third strand optionally form a double-stranded region of about 5 to about 13 base pairs; wherein at least one pyrimidine of the dsRNA is a pyrimidine nucleoside according to Formula I or II:

[chemical structure]

wherein R¹ and R² are each independently a —H, —OH, —OCH₃, —OCH₂OCH₂CH₃, —OCH₂CH₂OCH₃, halogen, substituted or unsubstituted C₁-C₁₀ alkyl, alkoxy, alkoxyalkyl, hydroxyalkyl, carboxyalkyl, alkylsulfonylamino, aminoalkyl, dialkylamino, alkylaminoalkyl, dialkylaminoalkyl, haloalkyl, trifluoromethyl, cycloalkyl, (cycloalkyl)alkyl, substituted or unsubstituted C₂-C₁₀ alkenyl, substituted or unsubstituted —O-allyl, O—CH₂CH═CH₂, —O—CH═CHCH₃, substituted or unsubstituted C₂-C₁₀ alkynyl, carbamoyl, carbamyl, carboxy, carbonylamino, substituted or unsubstituted aryl, substituted or unsubstituted aralkyl, —NH₂, —NO₂, —C≡N, or heterocyclo group; R³ and R⁴ are each independently a hydroxyl, a protected hydroxyl, or an internucleoside linking group; and R⁵ and R⁸ are independently O or S. In certain embodiments, at least one nucleoside is according to Formula I in which R¹ is methyl and R² is —OH, or R¹ is methyl, R² is —OH, and R⁸ is S. In certain embodiments, at least one nucleoside is according to Formula I in which R¹ is methyl and R² is —O-methyl, or R¹ is methyl, R² is —O-methyl, and R⁸ is O. In other embodiments, the internucleoside linking group covalently links from about 5 to about 40 nucleosides.

### Compositions and Methods of Use

[0157] As set forth herein, dsRNA of the instant disclosure are designed to target one or more ERBB family gene that is expressed at an elevated level or continues to be expressed when it should not, and is a causal or contributing factor associated with, for example, a hyperproliferative, angiogenic, or inflammatory disease, state, or adverse condition. In this context, a dsRNA or analog thereof of this disclosure will effectively downregulate expression of one or more ERBB family gene to levels that prevent, alleviate, or reduce the severity or recurrence of one or more associated disease symptoms. Alternatively, for various distinct disease models in which expression of one or more ERBB family gene is not necessarily elevated as a consequence or sequel of disease or other adverse condition, down regulation of one or more ERBB family gene will nonetheless result in a therapeutic result by lowering gene expression (i.e., to reduce levels of a selected mRNA or protein product of one or more ERBB family gene). Furthermore, dsRNAs of this disclosure may be targeted to reduce expression of one or more ERBB family gene, which can result in upregulation of a “downstream” gene whose expression is negatively regulated, directly or indirectly, by one or more ERBB family protein. The dsRNA molecules of the instant disclosure comprise useful reagents and can be used in methods for a variety of therapeutic, diagnostic, target validation, genomic discovery, genetic engineering, and pharmacogenomic applications.

[0158] In certain embodiments, aqueous suspensions contain dsRNA of this disclosure in admixture with suitable excipients, such as suspending agents or dispersing or wetting agents. Exemplary suspending agents include sodium carboxymethylcellulose, methylcellulose, hydropropyl-methylcellulose, sodium alginate, polyvinylpyrrolidone, gum tragacanth and gum acacia. Representative dispersing or wetting agents include naturally-occurring phosphatides (e.g., lecithin), condensation products of an alkylene oxide with fatty acids (e.g., polyoxyethylene stearate), condensation products of ethylene oxide with long chain aliphatic alcohols (e.g., heptadecaethyleneoxycetanol), condensation products of ethylene oxide with partial esters derived from fatty acids and hexitol (e.g., polyoxyethylene sorbitol monooleate), or condensation products of ethylene oxide with partial esters derived from fatty acids and hexitol anhydrides (e.g., polyethylene sorbitan monooleate). In certain embodiments, the aqueous suspensions can optionally contain one or more preservatives (e.g., ethyl or n-propyl-p-hydroxybenzoate), one or more coloring agents, one or more flavoring agents, or one or more sweetening agents (e.g., sucrose, saccharin). In additional embodiments, dispersible powders and granules suitable for preparation of an aqueous suspension by the addition of water provide dsRNA of this disclosure in admixture with a dispersing or wetting agent, suspending agent and optionally one or more preservative, coloring agent, flavoring agent, or sweetening agent.

[0159] The present disclosure includes dsRNA compositions prepared for storage or administration that include a pharmaceutically effective amount of a desired compound in a pharmaceutically acceptable carrier or diluent. Acceptable carriers or diluents for therapeutic use are well known in the pharmaceutical art, and are described, for example, in Remington's Pharmaceutical Sciences, Mack Publishing Co., A. R. Gennaro edit., 1985, hereby incorporated by reference herein. In certain embodiments, pharmaceutical compositions of this disclosure can optionally include preservatives, antioxidants, stabilizers, dyes, flavoring agents, or any combination thereof. Exemplary preservatives include sodium benzoate, sorbic acid and esters of p-hydroxybenzoic acid.

[0160] The dsRNA compositions of the instant disclosure can be effectively employed as pharmaceutically-acceptable formulations. Pharmaceutically-acceptable formulations prevent, alter the occurrence or severity of, or treat (alleviate one or more symptom(s) to a detectable or measurable extent) of a disease state or other adverse condition in a subject. A pharmaceutically acceptable formulation includes salts of the above compounds, e.g., acid addition salts, such as salts of hydrochloric acid, hydrobromic acid, acetic acid, or benzene sulfonic acid. A pharmaceutical composition or formulation refers to a composition or formulation in a form suitable for administration into a cell, or a subject such as a human (e.g., systemic administration). The formulations of the present disclosure, having an amount of dsRNA sufficient to treat or prevent a disorder associated with ERBB gene expression are, for example, suitable for topical (e.g., creams, ointments, skin patches, eye drops, ear drops) application or administration. Other routes of administration include oral, parenteral, sublingual, bladder wash-out, vaginal, rectal, enteric, suppository, nasal, and inhalation. The term parenteral, as used herein, includes subcutaneous, intravenous, intramuscular, intraarterial, intraabdominal, intraperitoneal, intraarticular, intraocular or retrobulbar, intraaural, intrathecal, intracavitary, intracelial, intraspinal, intrapulmonary or transpulmonary, intrasynovial, and intraurethral injection or infusion techniques. The pharmaceutical compositions of this disclosure are formulated so dsRNA contained therein is bioavailable upon administration to a subject.

[0161] In further embodiments, dsRNA of this disclosure can be formulated as oily suspensions or emulsions (e.g., oil-in-water) by suspending dsRNA in, for example, a vegetable oil (e.g., arachis oil, olive oil, sesame oil or coconut oil) or a mineral oil (e.g., liquid paraffin). Suitable emulsifying agents can be naturally-occurring gums (e.g., gum acacia or gum tragacanth), naturally-occurring phosphatides (e.g., soy bean, lecithin, esters or partial esters derived from fatty acids and hexitol), anhydrides (e.g., sorbitan monooleate), or condensation products of partial esters with ethylene oxide (e.g., polyoxyethylene sorbitan monooleate). In certain embodiments, the oily suspensions or emulsions can optionally contain a thickening agent, such as beeswax, hard paraffin or cetyl alcohol. In related embodiments, sweetening agents and flavoring agents can optionally be added to provide palatable oral preparations. In yet other embodiments, these compositions can be preserved by the optionally adding an anti-oxidant, such as ascorbic acid.

[0162] In further embodiments, dsRNA of this disclosure can be formulated as syrups and elixirs with sweetening agents (e.g., glycerol, propylene glycol, sorbitol, glucose or sucrose). Such formulations can also contain a demulcent, preservative, flavoring, coloring agent, or any combination thereof. In other embodiments, pharmaceutical compositions comprising dsRNA of this disclosure can be in the form of a sterile, injectable aqueous or oleaginous suspension. The sterile injectable preparation can also be a sterile, injectable solution or suspension in a non-toxic parenterally acceptable diluent or solvent (e.g., as a solution in 1,3-butanediol). Among the exemplary acceptable vehicles and solvents useful in the compositions of this disclosure is water, Ringer's solution, or isotonic sodium chloride solution. In addition, sterile, fixed oils may be employed as a solvent or suspending medium for the dsRNA of this disclosure. For this purpose, any bland fixed oil can be employed including synthetic mono- or diglycerides. In addition, fatty acids such as oleic acid find use in the preparation of parenteral formulations.

[0163] Pharmaceutical compositions and methods are provided that feature the presence or administration of one or more dsRNA of this disclosure combined, complexed, or conjugated with a polypeptide, optionally formulated with a pharmaceutically-acceptable carrier, such as a diluent, stabilizer, buffer, or the like. Alternatively, dsRNA molecules of this disclosure may be administered to a patient with or without stabilizers, buffers, or the like, to form a composition suitable for treatment. When desired, a liposome delivery mechanism and known protocols for formation of liposomes can be used. The compositions of this disclosure may also be formulated and used as a tablet, capsule, or elixir for oral administration, as a suppository for rectal administration, sterile or pyrogen-free solution, or as a suspension for injection, either with or without other known compounds. Thus, dsRNAs of the present disclosure may be administered in any form, such as nasally, transdermally, parenterally, or by local injection.

[0164] In accordance with this disclosure herein, dsRNA molecules (optionally substituted, modified, or conjugated), compositions thereof, and methods for inhibiting expression of one or more ERBB family genes in a cell or organism are provided. In certain embodiments, provided are methods and dsRNA compositions for treating a subject, including a human cell, tissue or individual, having a disease or at risk of developing a disease caused by or associated with the expression of one or more ERBB family gene. In one embodiment, the method includes administering a dsRNA of this disclosure or a pharmaceutical composition containing the dsRNA to a cell or an organism, such as a mammal, such that expression of the target gene is silenced. Subjects (e.g., mammalian, human) amendable for treatment using the dsRNA molecules (optionally substituted or modified or conjugated), compositions thereof, and methods of the present disclosure include those suffering from one or more disease or condition mediated, at least in part, by overexpression or inappropriate expression of one or more ERBB family gene, or which are amenable to treatment by reducing expression of one or more ERBB family protein, including a hyperproliferative (e.g., cancer), angiogenic (e.g., age-related macular degeneration), metabolic (e.g., diabetes), or inflammatory (e.g., arthritis) disease or condition.

[0165] The compositions and methods of this disclosure are useful as therapeutic tools to regulate expression of one or more ERBB family member to treat or prevent symptoms of, for example, hyperproliferative disorders. Exemplary hyperproliferative disorders include neoplasms, carcinomas, sarcomas, tumors, or cancer. More exemplary hyperproliferative disorders include oral cancer, throat cancer, laryngeal cancer, esophageal cancer, pharyngeal cancer, nasopharyngeal cancer, oropharyngeal cancer, gastrointestinal tract cancer, small intestine cancer, colon cancer, rectal cancer, colorectal cancer, anal cancer, pancreatic cancer, breast cancer, cervical cancer, uterine cancer, vulvar cancer, vaginal cancer, urinary tract cancer, bladder cancer, kidney cancer, adrenocortical cancer, islet cell carcinoma, gallbladder cancer, stomach cancer, prostate cancer, ovarian cancer, endometrial cancer, trophoblastic tumor, testicular cancer, penial cancer, bone cancer, osteosarcoma, liver cancer, extrahepatic bile duct cancer, skin cancer, basal cell carcinoma, lung cancer, small cell lung cancer, non-small cell lung cancer (NSCLC), brain cancer, melanoma, Kaposi's sarcoma, eye cancer, head and neck cancer, squamous cell carcinoma of head and neck, tymoma, thymic carcinoma, thyroid cancer, parathyroid cancer, Hippel-Lindau syndrome, leukemia, acute myeloid leukemia, chronic myelogenous leukemia, acute lymphoblastic leukemia, hairy cell leukemia, lymphoma, non-Hodgkin's lymphoma, Burkitt's lymphoma, T-cell lymphoma, multiple myeloma, malignant pleural mesothelioma, Barrett's adenocarcinoma, Wilm's tumor, or the like.

[0166] Exemplary inflammatory disorders include diabetes mellitus, rheumatoid arthritis, pannus growth in inflamed synovial lining, collagen-induced arthritis, spondylarthritis, ankylosing spondylitis, multiple sclerosis, encephalomyelitis, inflammatory bowel disease, Chron's disease, psoriasis or psoriatic arthritis, myasthenia gravis, systemic lupus erythematosis, graft-versus-host disease, and allergies. Other exemplary disorders include asthma, chronic bronchitis, ocular neovascularization (e.g., retinal ischaemia, age-related macular degeneration, diabetic retinopathy), glomerulonephritis, lymphangiogenesis, and atherosclerosis.

[0167] In any of the methods disclosed herein, there may be used one or more dsRNA, or substituted or modified dsRNA as described herein, which comprises a first strand that is complementary to an epidermal growth factor receptor (EGFR) mRNA as set forth in SEQ ID NO:1158, 1159, 1160, or 1161 and is fully complementary, with up to three mismatches, to at least one other human ERBB family mRNA selected from SEQ ID NO:1162, 1163, 1164, 1165, or 1166, and a second strand and a third strand that is each complementary to non-overlapping regions of the first strand, wherein the second strand and third strands can anneal with the first strand to form at least two double-stranded regions spaced apart by up to 10 nucleotides and thereby forming a gap between the second and third strands, and wherein the mdRNA molecule optionally includes at least one double-stranded region of 5 base pairs to 13 base pairs. In other embodiments, subjects can be effectively treated, prophylactically or therapeutically, by administering an effective amount of one or more dsRNA having a first strand that is complementary to an EGFR mRNA as set forth in SEQ ID NO:1158, 1159, 1160, or 1161 and is fully complementary, with up to three mismatches, to at least one other human ERBB family mRNA selected from SEQ ID NO:1162, 1163, 1164, 1165, or 1166, and a second strand and a third strand that is each complementary to non-overlapping regions of the first strand, wherein the second strand and third strands can anneal with the first strand to form at least two double-stranded regions spaced apart by up to 10 nucleotides and thereby forming a gap between the second and third strands, and wherein the mdRNA molecule optionally includes at least one double-stranded region of 5 base pairs to 13 base pairs and at least one pyrimidine of the mdRNA is a pyrimidine nucleoside according to Formula I or II:

[chemical structure]

wherein R¹ and R² are each independently a —H, —OH, —OCH₃, —OCH₂OCH₂CH₃, —OCH₂CH₂OCH₃, halogen, substituted or unsubstituted C₁-C₁₀ alkyl, alkoxy, alkoxyalkyl, hydroxyalkyl, carboxyalkyl, alkylsulfonylamino, aminoalkyl, dialkylamino, alkylaminoalkyl, dialkylaminoalkyl, haloalkyl, trifluoromethyl, cycloalkyl, (cycloalkyl)alkyl, substituted or unsubstituted C₂-C₁₀ alkenyl, substituted or unsubstituted —O-allyl, —O—CH₂CH═CH₂, —O—CH═CHCH₃, substituted or unsubstituted C₂-C₁₀ alkynyl, carbamoyl, carbamyl, carboxy, carbonylamino, substituted or unsubstituted aryl, substituted or unsubstituted aralkyl, —NH₂, —NO₂, —C≡N, or heterocyclo group; R³ and R⁴ are each independently a hydroxyl, a protected hydroxyl, or an internucleoside linking group; and R⁵ and R⁸ are independently O or S. In certain embodiments, at least one nucleoside is according to Formula I in which R¹ is methyl and R² is —OH, or R¹ is methyl, R² is —OH, and R⁸ is S. In certain embodiments, at least one nucleoside is according to Formula I in which R¹ is methyl and R² is —O-methyl, or R¹ is methyl, R² is —O-methyl, and R⁸ is O. In other embodiments, the internucleoside linking group covalently links from about 5 to about 40 nucleosides.

[0168] In any of the methods described herein, the dsRNA used may include multiple modifications. For example, a dsRNA can have at least one 5-methyluridine, 2′-O-methyl-5-methyluridine, LNA, 2′-methoxy, 2′-fluoro, 2′-deoxy, phosphorothioate linkage, inverted base terminal cap, or any combination thereof. In certain exemplary methods, a dsRNA will have from one to all 5-methyluridines and have up to about 75% LNA. In other exemplary methods, a dsRNA will have from one to all 5-methyluridines and have up to about 75% 2′-methoxy provided the 2′-methoxy are not at the Argonaute cleavage site. In still other exemplary methods, a dsRNA will have from one to all 5-methyluridines and have up to about 100% 2′-fluoro substitutions. In further exemplary methods, a dsRNA will have from one to all 5-methyluridines and have up to about 75% 2′-deoxy. In further exemplary methods, a dsRNA will have up to about 75% LNA and have up to about 75% 2′-methoxy. In still other embodiments, a dsRNA will have up to about 75% LNA and have up to about 100% 2′-fluoro. In further exemplary methods, a dsRNA will have up to about 75% LNA and have up to about 75% 2′-deoxy. In further exemplary methods, a dsRNA will have up to about 75% 2′-methoxy and have up to about 100% 2′-fluoro. In further exemplary methods, a dsRNA will have up to about 75% 2′-methoxy and have up to about 75% 2′-deoxy. In further embodiments, a dsRNA will have up to about 100% 2′-fluoro and have up to about 75% 2′-deoxy.

[0169] In other exemplary methods for using multiply modified dsRNA, a dsRNA will have from one to all uridines substituted with 5-methyluridine, up to about 75% LNA, and up to about 75% 2′-methoxy. In still further exemplary methods, a dsRNA will have from one to all 5-methyluridines, up to about 75% LNA, and up to about 100% 2′-fluoro. In further exemplary methods, a dsRNA will have from one to all 5-methyluridines, up to about 75% LNA, and up to about 75% 2′-deoxy. In further exemplary methods, a dsRNA will have from one to all 5-methyluridines, up to about 75% 2′-methoxy, and up to about 75% 2′-fluoro. In further exemplary methods, a dsRNA will have from one to all 5-methyluridines, up to about 75% 2′-methoxy, and up to about 75% 2′-deoxy. In more exemplary methods, a dsRNA will have from one to all 5-methyluridines, up to about 100% 2′-fluoro, and up to about 75% 2′-deoxy. In yet other exemplary methods, a dsRNA will have from one to all 5-methyluridines, up to about 75% LNA, up to about 75% 2′-methoxy, up to about 100% 2′-fluoro, and up to about 75% 2′-deoxy. In other exemplary methods, a dsRNA will have up to about 75% LNA, up to about 75% 2′-methoxy, and up to about 100% 2′-fluoro. In further exemplary methods, a dsRNA will have up to about 75% LNA, up to about 75% 2′-methoxy, and up to about 75% 2′-deoxy. In more exemplary methods, a dsRNA will have up to about 75% LNA, up to about 100% 2′-fluoro, and up to about 75% 2′-deoxy. In still further exemplary methods, a dsRNA will have up to about 75% 2′-methoxy, up to about 100% 2′-fluoro, and up to about 75% 2′-deoxy.

[0170] In any of these exemplary methods for using multiply modified dsRNA, the dsRNA may further comprise up to 100% phosphorothioate internucleoside linkages, from one to ten or more inverted base terminal caps, or any combination thereof. Additionally, any of these dsRNA may have these multiple modifications on one strand, two strands, three strands, a plurality of strands, or all strands, or on the same or different nucleoside within a dsRNA molecule. Finally, in any of these multiple modification dsRNA, the dsRNA must have gene silencing activity.

[0171] In further embodiments, subjects can be effectively treated, prophylactically or therapeutically, by administering an effective amount of one or more dsRNA, or substituted or modified dsRNA as described herein, having a first strand that is complementary to an epidermal growth factor receptor (EGFR) mRNA as set forth in SEQ ID NO:1158, 1159, 1160, or 1161 and is fully complementary, with up to three mismatches, to at least one other human ERBB family mRNA selected from SEQ ID NO:1162, 1163, 1164, 1165, or 1166, and a second strand and a third strand that is each complementary to non-overlapping regions of the first strand, wherein the second strand and third strands can anneal with the first strand to form at least two double-stranded regions spaced apart by up to 10 nucleotides and thereby forming a gap between the second and third strands, and wherein the combined double-stranded regions total about 15 base pairs to about 40 base pairs and the mdRNA molecule optionally has blunt ends. In still further embodiments, methods disclosed herein there may be used with one or more dsRNA that comprises a first strand that is complementary to a human EGFR mRNA as set forth in SEQ ID NO:1158, 1159, 1160, or 1161 and is fully complementary, with up to three mismatches, to at least one other human ERBB family mRNA selected from SEQ ID NO:1162, 1163, 1164, 1165, or 1166, and a second strand and a third strand that is each complementary to non-overlapping regions of the first strand, wherein the second strand and third strands can anneal with the first strand to form at least two double-stranded regions spaced apart by up to 10 nucleotides and thereby forming a gap between the second and third strands, and wherein the combined double-stranded regions total about 15 to about 40 base pairs, the mdRNA molecule optionally includes at least one double-stranded region of 5 to 13 base pairs, optionally has blunt ends, or any combination thereof, and at least one pyrimidine of the mdRNA is a pyrimidine nucleoside according to Formula I or II:

[chemical structure]

wherein R¹ and R² are each independently a —H, —OH, —OCH₃, —OCH₂OCH₂CH₃, —OCH₂CH₂OCH₃, halogen, substituted or unsubstituted C₁-C₁₀ alkyl, alkoxy, alkoxyalkyl, hydroxyalkyl, carboxyalkyl, alkylsulfonylamino, aminoalkyl, dialkylamino, alkylaminoalkyl, dialkylaminoalkyl, haloalkyl, trifluoromethyl, cycloalkyl, (cycloalkyl)alkyl, substituted or unsubstituted C₂-C₁₀ alkenyl, substituted or unsubstituted —O-allyl, —O—CH₂CH═CH₂, —O—CH═CHCH₃, substituted or unsubstituted C₂-C₁₀ alkynyl, carbamoyl, carbamyl, carboxy, carbonylamino, substituted or unsubstituted aryl, substituted or unsubstituted aralkyl, —NH₂, —NO₂, —C≡, or heterocyclo group; R³ and R⁴ are each independently a hydroxyl, a protected hydroxyl, or an internucleoside linking group; and R⁵ and R⁸ are independently O or S. In certain embodiments, at least one nucleoside is according to Formula I in which R¹ is methyl and R² is —OH, or R¹ is methyl, R² is —OH, and R⁸ is S. In certain embodiments, at least one nucleoside is according to Formula I in which R¹ is methyl and R² is —O-methyl, or R¹ is methyl, R² is —O-methyl, and R⁸ is O. In other embodiments, the internucleoside linking group covalently links from about 5 to about 40 nucleosides.

[0172] Within additional aspects of this disclosure, combination formulations and methods are provided comprising an effective amount of one or more dsRNA of the present disclosure in combination with one or more secondary or adjunctive active agents that are formulated together or administered coordinately with the dsRNA of this disclosure to control one or more ERBB family member-associated disease or condition as described herein. Useful adjunctive therapeutic agents in these combinatorial formulations and coordinate treatment methods include, for example, enzymatic nucleic acid molecules, allosteric nucleic acid molecules, antisense, decoy, or aptamer nucleic acid molecules, antibodies such as monoclonal antibodies, small molecules and other organic or inorganic compounds including metals, salts and ions, and other drugs and active agents indicated for treating one or more ERBB family member-associated disease or condition, including chemotherapeutic agents used to treat cancer, steroids, non-steroidal anti-inflammatory drugs (NSAIDs), or the like.

[0173] Exemplary chemotherapeutic agents include alkylating agents (e.g., cisplatin, oxaliplatin, carboplatin, busulfan, nitrosoureas, nitrogen mustards, uramustine, temozolomide), antimetabolites (e.g., aminopterin, methotrexate, mercaptopurine, fluorouracil, cytarabine), taxanes (e.g., paclitaxel, docetaxel), anthracyclines (e.g., doxorubicin, daunorubicin, epirubicin, idaruicin, mitoxantrone, valrubicin), bleomycin, mytomycin, actinomycin, hydroxyurea, topoisomerase inhibitors (e.g., camptothecin, topotecan, irinotecan, etoposide, teniposide), monoclonoal antibodies (e.g., alemtuzumab, bevacizumab, cetuximab, gemtuzumab, panitumumab, rituximab, tositumomab, trastuzumab,), vinca alkaloids (e.g., vincristine, vinblastine, vindesine, vinorelbine), cyclophosphamide, prednisone, leucovorin, oxaliplatin.

[0174] To practice the coordinate administration methods of this disclosure, a dsRNA is administered, simultaneously or sequentially, in a coordinate treatment protocol with one or more of the secondary or adjunctive therapeutic agents contemplated herein. The coordinate administration may be done in either order, and there may be a time period while only one or both (or all) active therapeutic agents, individually or collectively, exert their biological activities. A distinguishing aspect of all such coordinate treatment methods is that the dsRNA present in the composition elicits some favorable clinical response, which may or may not be in conjunction with a secondary clinical response provided by the secondary therapeutic agent. Often, the coordinate administration of the dsRNA with a secondary therapeutic agent as contemplated herein will yield an enhanced therapeutic response beyond the therapeutic response elicited by either or both the purified dsRNA or secondary therapeutic agent alone.

[0175] In another embodiment, a dsRNA of this disclosure can include a conjugate member on one or more of the terminal nucleotides of a dsRNA. The conjugate member can be, for example, a lipophile, a terpene, a protein binding agent, a vitamin, a carbohydrate, or a peptide.

[0176] For example, the conjugate member can be naproxen, nitroindole (or another conjugate that contributes to stacking interactions), folate, ibuprofen, or a C5 pyrimidine linker. In other embodiments, the conjugate member is a glyceride lipid conjugate (e.g., a dialkyl glyceride derivatives), vitamin E conjugates, or thio-cholesterols. Additional conjugate members include peptides that function, when conjugated to a modified dsRNA of this disclosure, to facilitate delivery of the dsRNA into a target cell, or otherwise enhance delivery, stability, or activity of the dsRNA when contacted with a biological sample (e.g., a target cell expressing VEGFR). Exemplary peptide conjugate members for use within these aspects of this disclosure, include peptides PN27, PN28, PN29, PN58, PN61, PN73, PN158, PN159, PN173, PN182, PN183, PN202, PN204, PN250, PN361, PN365, PN404, PN453, PN509, and PN963, described, for example, in U.S. Patent Application Publication Nos. 2006/0040882 and 2006/0014289, and U.S. Provisional Patent Application Nos. 60/822,896 and 60/939,578; and PCT Application PCT/US2007/075744, which are all incorporated herein by reference. In certain embodiments, when peptide conjugate partners are used to enhance delivery of dsRNA of this disclosure, the resulting dsRNA formulations and methods will often exhibit further reduction of an interferon response in target cells as compared to dsRNAs delivered in combination with alternate delivery vehicles, such as lipid delivery vehicles (e.g., Lipofectamine™).

[0177] In still another embodiment, a dsRNA or analog thereof of this disclosure may be conjugated to the polypeptide and admixed with one or more non-cationic lipids or a combination of a non-cationic lipid and a cationic lipid to form a composition that enhances intracellular delivery of the dsRNA as compared to delivery resulting from contacting the target cells with a naked dsRNA. In more detailed aspects of this disclosure, the mixture, complex or conjugate comprising a dsRNA and a polypeptide can be optionally combined with (e.g., admixed or complexed with) a cationic lipid, such as Lipofectine™. To produce these compositions comprised of a polypeptide, dsRNA and a cationic lipid, the dsRNA and peptide may be mixed together first in a suitable medium such as a cell culture medium, after which the cationic lipid is added to the mixture to form a dsRNA/delivery peptide/cationic lipid composition. Optionally, the peptide and cationic lipid can be mixed together first in a suitable medium such as a cell culture medium, followed by the addition of the dsRNA to form the dsRNA/delivery peptide/cationic lipid composition.

[0178] This disclosure also features the use of dsRNA compositions comprising surface-modified liposomes containing, for example, poly(ethylene glycol) lipids (PEG-modified, or long-circulating liposomes or stealth liposomes) (Lasic et al., Chem. Rev. 95:2601, 1995; Ishiwata et al., Chem. Pharm. Bull. 43:1005, 1995; Lasic et al., Science 267:1275, 1995; Oku et al., Biochim. Biophys. Acta 1238:86, 1995; Liu et al., J. Biol. Chem. 42:24864, 1995; PCT Publication Nos. WO 96/10391; WO 96/10390; WO 96/10392).

[0179] In another embodiment, compositions are provided for targeting dsRNA molecules of this disclosure to specific cell types, such as hepatocytes. For example, dsRNA can be complexed or conjugated glycoproteins or synthetic glycoconjugates glycoproteins or synthetic glycoconjugates having branched galactose (e.g., asialoorosomucoid), N-acetyl-D-galactosamine, or mannose (see, e.g., Wu and Wu, J. Biol. Chem. 262:4429, 1987; Baenziger and Fiete, Cell 22: 611, 1980; Connolly et al., J. Biol. Chem. 257:939, 1982; Lee and Lee, Glycoconjugate J. 4:317, 1987; Ponpipom et al., J. Med. Chem. 24:1388, 1981) for a targeted delivery to, for example, the liver.

[0180] A pharmaceutically effective dose is that dose required to prevent, inhibit the occurrence, or treat (alleviate a symptom to some extent, preferably all of the symptoms) of a disease state. The pharmaceutically effective dose depends on the type of disease, the composition used, the route of administration, the type of mammal being treated, the physical characteristics of the specific mammal under consideration, concurrent medication, and other factors that those skilled in the medical arts will recognize. For example, an amount between 0.1 mg/kg and 100 mg/kg body weight/day of active ingredients is administered dependent upon potency of the dsRNAs of this disclosure.

[0181] A specific dose level for any particular patient depends upon a variety of factors including the activity of the specific compound employed, age, body weight, general health, sex, diet, time of administration, route of administration, rate of excretion, drug combination, and the severity of the particular disease undergoing therapy. Following administration of dsRNA compositions as disclosed herein, test subjects will exhibit about a 10% up to about a 99% reduction in one or more symptoms associated with the disease or disorder being treated, as compared to placebo-treated or other suitable control subjects.

[0182] Dosage levels in the order of about 0.1 mg to about 140 mg per kilogram of body weight per day can be useful in the treatment of the above-indicated conditions (about 0.5 mg to about 7 g per patient per day). The amount of active ingredient that can be combined with the carrier materials to produce a single dosage form varies depending upon the host treated and the particular mode of administration. Dosage unit forms generally contain between from about 1 mg to about 500 mg of an active ingredient.

[0183] A dosage form of a dsRNA or composition thereof of this disclosure can be liquid, an emulsion, or a micelle, or in the form of an aerosol or droplets. A dosage form of a dsRNA or composition thereof of this disclosure can be solid, which can be reconstituted in a liquid prior to administration. The solid can be administered as a powder. The solid can be in the form of a capsule, tablet, or gel. In addition to in vivo gene inhibition, a skilled artisan will appreciate that the dsRNA and analogs thereof of the present disclosure are useful in a wide variety of in vitro applications, such as scientific and commercial research (e.g., elucidation of physiological pathways, drug discovery and development), and medical and veterinary diagnostics.

[0184] Nucleic acid molecules and polypeptides can be administered to cells by a variety of methods known to those of skill in the art, including administration within formulations that comprise a dsRNA alone, a dsRNA and a polypeptide complex/conjugate alone, or that further comprise one or more additional components, such as a pharmaceutically acceptable carrier, diluent, excipient, adjuvant, emulsifier, stabilizer, preservative, or the like. Other exemplary substances used to approximate physiological conditions include pH adjusting and buffering agents, tonicity adjusting agents, and wetting agents, for example, sodium acetate, sodium lactate, sodium chloride, potassium chloride, calcium chloride, sorbitan monolaurate, triethanolamine oleate, and mixtures thereof. For solid compositions, conventional nontoxic pharmaceutically acceptable carriers can be used which include, for example, pharmaceutical grades of mannitol, lactose, starch, magnesium stearate, sodium saccharin, talcum, cellulose, glucose, sucrose, magnesium carbonate, and the like.

[0185] In certain embodiments, the dsRNA and compositions thereof can be encapsulated in liposomes, administered by iontophoresis, or incorporated into other vehicles, such as hydrogels, cyclodextrins, biodegradable nanocapsules, bioadhesive microspheres, or proteinaceous vectors (see, e.g., PCT Publication No. WO 00/53722). In certain embodiments of this disclosure, the dsRNA may be administered in a time release formulation, for example, in a composition that includes a slow release polymer. The dsRNA can be prepared with carriers that will protect against rapid release, for example, a controlled release vehicle such as a polymer, microencapsulated delivery system, or bioadhesive gel. Prolonged delivery of the dsRNA, in various compositions of this disclosure can be brought about by including in the composition agents that delay absorption, for example, aluminum monosterate hydrogels and gelatin.

[0186] Alternatively, a dsRNA composition of this disclosure can be locally delivered by direct injection or by use of, for example, an infusion pump. Direct injection of dsRNAs of this disclosure, whether subcutaneous, intramuscular, or intradermal, can be done by using standard needle and syringe methodologies or by needle-free technologies, such as those described in Conry et al., Clin. Cancer Res. 5:2330, 1999 and PCT Publication No. WO 99/31262.

[0187] The dsRNA of this disclosure and compositions thereof may be administered to subjects by a variety of mucosal administration modes, including oral, rectal, vaginal, intranasal, intrapulmonary, or transdermal delivery, or by topical delivery to the eyes, ears, skin, or other mucosal surfaces. In one embodiment, the mucosal tissue layer includes an epithelial cell layer, which can be pulmonary, tracheal, bronchial, alveolar, nasal, buccal, epidermal, or gastrointestinal. Compositions of this disclosure can be administered using conventional actuators, such as mechanical spray devices, as well as pressurized, electrically activated, or other types of actuators. The dsRNAs can also be administered in the form of suppositories, e.g., for rectal administration. For example, these compositions can be mixed with an excipient that is solid at room temperature but liquid at the rectal temperature so that the dsRNA is released. Such materials include, for example, cocoa butter and polyethylene glycols.

[0188] Further methods for delivery of nucleic acid molecules, such as the dsRNAs of this disclosure, are described, for example, in Boado et al., J. Pharm. Sci. 87:1308, 1998; Tyler et al., FEBS Lett. 421:280, 1999; Pardridge et al., Proc. Nat'l Acad. Sci. USA 92:5592, 1995; Boado, Adv. Drug Delivery Rev. 15:73, 1995; Aldrian-Herrada et al., Nucleic Acids Res. 26:4910, 1998; Tyler et al., Proc. Nat'l Acad. Sci. USA 96:7053-7058, 1999; Akhtar et al., Trends Cell Bio. 2:139, 1992; “Delivery Strategies for Antisense Oligonucleotide Therapeutics,” ed. Akhtar, 1995, Maurer et al., Mol. Membr. Biol. 16:129, 1999; Hofland and Huang, Handb. Exp. Pharmacol 137:165, 1999; and Lee et al., ACS Symp. Ser. 752:184, 2000; PCT Publication No. WO 94/02595.

[0189] All U.S. patents, U.S. patent application publications, U.S. patent applications, foreign patents, foreign patent applications, non-patent publications, figures, and websites referred to in this specification are expressly incorporated herein by reference, in their entirety.

### EXAMPLES

### Example 1

### Knockdown of Gene Expression by mdRNA

[0190] The gene silencing activity of dsRNA as compared to nicked or gapped versions of the same dsRNA was examined using a dual fluorescence assay. A total of 22 different genes were targeted at ten different sites each (see Table 1).

[0191] A Dicer substrate dsRNA molecule was used, which has a 25 nucleotide sense strand, a 27 nucleotide antisense strand, and a two deoxynucleotide overhang at the 3′-end of the antisense strand (referred to as a 25/27 dsRNA). The nicked version of each dsRNA Dicer substrate has a nick at one of positions 9 to 16 on the sense strand as measured from the 5′-end of the sense strand. For example, an ndsRNA having a nick at position 11 has three strands—a 5′-sense strand of 11 nucleotides, a 3′-sense strand of 14 nucleotides, and an antisense strand of 27 nucleotides (which is also referred to as an N11-14/27 mdRNA). In addition, each of the sense strands of the ndsRNA have three locked nucleic acids (LNAs) evenly distributed along each sense fragment. If the nick is at position 9, then the LNAs can be found at positions 2, 6, and 9 of the 5′ sense strand fragment and at positions 11, 18, and 23 of the 3′ sense strand fragment. If the nick is at position 10, then the LNAs can be found at positions 2, 6, and 10 of the 5′ sense strand fragment and at positions 12, 18, and 23 of the 3′ sense strand fragment. If the nick is at position 11, then the LNAs can be found at positions 2, 6, and 11 of the 5′ sense strand fragment and at positions 13, 18, and 23 of the 3′ sense strand fragment. If the nick is at position 12, then the LNAs can be found at positions 2, 6, and 12 of the 5′ sense strand fragment and at positions 14, 18, and 23 of the 3′ sense strand fragment. If the nick is at position 13, then the LNAs can be found at positions 2, 7, and 13 of the 5′ sense strand fragment and at positions 15, 18, and 23 of the 3′ sense strand fragment. If the nick is at position 14, then the LNAs can be found at positions 2, 7, and 14 of the 5′ sense strand fragment and at positions 16, 18, and 23 of the 3′ sense strand fragment. If the nick is at position 15, then the LNAs can be found at positions 2, 8, and 15 of the 5′ sense strand fragment and at positions 17, 19, and 23 of the 3′ sense strand fragment. If the nick is at position 16, then the LNAs can be found at positions 2, 8, and 16 of the 5′ sense strand fragment and at positions 18, 19, and 23 of the 3′ sense strand fragment. Similarly, a gapped version of each dsRNA Dicer substrate has a single nucleotide missing at one of positions 10 to 17 on the sense strand as measured from the 5′-end of the sense strand. For example, a gdsRNA having a gap at position 11 has three strands—a 5′-sense strand of 11 nucleotides, a 3′-sense strand of 13 nucleotides, and an antisense strand of 27 nucleotides (which is also referred to as G11-(1)-13/27 mdRNA). In addition, each of the sense strands of the gdsRNA contain three locked nucleic acids (LNAs) evenly distributed along each sense fragment (as described for the nicked counterparts).

[0192] In sum, three dsRNA were tested at each of the ten different sites per gene—an unmodified dsRNA, a nicked mdRNA with three LNAs per sense strand fragment, and a single nucleotide gapped mdRNA with three LNAs per sense strand fragment. In other words, 660 different dsRNA were examined.

[0193] Briefly, multiwell plates were seeded with about 7-8×10⁵ HeLa cells/well in DMEM having 10% fetal bovine serum, and incubated overnight at 37° C./5% CO₂. The HeLa cell medium was changed to serum-free DMEM just prior to transfection. The psiCHECK™-2 vector, containing about a 1,000 basepair insert of a target gene, diluted in serum-free DMEM was mixed with diluted GenJet™ transfection reagent (SignalDT Biosystems, Hayward, Calif.) according to the manufacturer's instructions and then incubated at room temperature for 10 minutes. The GenJet/psiCHECK™-2-[target gene insert] solution was added to the HeLa cells and then incubated at 37° C., 5% CO₂ for 4.5 hours. After the vector transfection, cells were trypsinized and suspended in antibiotic-free DMEM containing 10% FBS at a concentration of 10⁵ cells per mL.

[0194] To transfect the dsRNA, the dsRNA was formulated in OPTI-MEM I reduced serum medium (Gibco® Invitrogen, Carlsbad, Calif.) and placed in multiwell plates. Then Lipofectamine™ RNAiMAX (Invitrogen) was mixed with OPTI-MEM per manufacture's specifications, added to each well containing dsRNA, mixed manually, and incubated at room temperature for 10-20 minutes. Then 30 μL of vector-transfected HeLa cells at 10⁵ cells per mL were added to each well (final dsRNA concentration of 25 nM), the plates were spun for 30 seconds at 1,000 rpm, and then incubated at 37° C./5% CO₂ for 2 days. The Cell Titer Blue (CTB) reagent (Promega, Madison, Wis.) was used to assay for cell viability and proliferation—none of the dsRNA showed any substantial toxicity.

[0195] After transfecting, the media and CTB reagent were removed and the wells washed once with 100 PBS. Cells were assayed for firefly and Renilla luciferase reporter activity by first adding Dual-Glo™ Luciferase Reagent (Promega, Madison, Wis.) for 10 minutes with shaking, and then quantitating the luminescent signal on a VICTOR³™ 1420 Multilabel Counter (PerkinElmer). After measuring the firefly luminescence, Stop & Glo® Reagent (Promega, Madison, Wis.) was added for 10 minutes with shaking to simultaneously quench the firefly reaction and initiate the Renilla luciferase reaction, which was then quantitated on a VICTOR³™ 1420 Multilabel Counter (PerkinElmer). The results are presented in Table 1.

TABLE 1
Gene Silencing Activity* of dsRNA Dicer Substrate and mdRNA (nicked or gapped) Dicer Substrate

| | | | Dicer | Dicer | | | | | | | | |
|---|---|---|---|---|---|---|---|---|---|---|---|---|
| | | | SEQ ID | Mean | Dicer | Nicked | Nicked | Nicked | Gapped | Gapped | Gapped | Length |
| Set | Target | Pos† | NOS‡ | (%) | 95% CI | SEQ ID NOS | Mean (%) | 95% CI | SEQ ID NOS | Mean (%) | 95% CI | 5′-S\hat{ } |
| 1 | AKT1 | 1862 | 63, 283 | 20.6 | 4.0% | 503, 723, 283 | 23.5 | 5.7% | 503, 940, 283 | 54.3 | 12.0% | 14 |
| 2 | AKT1 | 1883 | 64, 284 | 29.7 | 7.3% | 504, 724, 284 | 51.4 | 6.7% | 504, 941, 284 | 76.9 | 19.5% | 12 |
| 3 | AKT1 | 2178 | 65, 285 | 15.4 | 2.4% | 505, 725, 285 | 22.3 | 6.4% | 505, 942, 285 | 24.4 | 5.1% | 14 |
| 4 | AKT1 | 2199 | 66, 286 | 26.4 | 3.6% | 506, 726, 286 | 62.7 | 6.6% | 506, 943, 286 | 66.8 | 10.8% | 15 |
| 5 | AKT1 | 2264 | 67, 287 | 35.2 | 7.3% | 507, 727, 287 | 34.1 | 7.3% | 507, 944, 287 | 31.3 | 5.2% | 12 |
| 6 | AKT1 | 2580 | 68, 288 | 27.6 | 5.7% | 508, 728, 288 | 40.1 | 8.3% | 508, 945, 288 | 91.5 | 17.0% | 12 |
| 7 | AKT1 | 2606 | 69, 289 | 14.0 | 2.6% | 509, 729, 289 | 14.9 | 3.2% | 509, 946, 289 | 33.4 | 6.9% | 11 |
| 8 | AKT1 | 2629 | 70, 290 | 21.0 | 10.1% | 510, 730, 290 | 13.5 | 2.4% | 510, 947, 290 | 13.6 | 2.1% | 12 |
| 9 | AKT1 | 2661 | 71, 291 | 37.4 | 6.6% | 511, 731, 291 | 41.0 | 12.1% | 511, 948, 291 | 71.6 | 11.9% | 15 |
| 10 | AKT1 | 2663 | 72, 292 | 18.1 | 4.3% | 512, 732, 292 | 23.0 | 5.9% | 512, 949, 292 | 51.4 | 9.2% | 14 |
| 11 | BCR-ABL (b2a2) | 66 | 73, 293 | 16.9 | 5.9% | 513, 733, 293 | 30.4 | 10.5% | 513, 950, 293 | 38.2 | 11.7% | 13 |
| 12 | BCR-ABL (b2a2) | 190 | 74, 294 | 40.0 | 11.6% | 514, 734, 294 | 22.0 | 6.4% | 514, 951, 294 | 34.6 | 12.0% | 14 |
| 13 | BCR-ABL (b2a2) | 282 | 75, 295 | 24.2 | 5.2% | 515, 735, 295 | 37.6 | 8.2% | 515, 952, 295 | 34.6 | 8.6% | 13 |
| 14 | BCR-ABL (b2a2) | 284 | 76, 296 | 50.9 | 6.9% | 516, 736, 296 | 38.3 | 7.8% | 516, 953, 296 | 68.3 | 18.0% | 13 |
| 15 | BCR-ABL (b2a2) | 287 | 77, 297 | 45.5 | 13.2% | 517, 737, 297 | 39.6 | 11.5% | 517, 954, 297 | 75.2 | 17.2% | 14 |
| 16 | BCR-ABL (b2a2) | 289 | 78, 298 | 36.9 | 7.7% | 518, 738, 298 | 40.0 | 8.9% | 518, 955, 298 | 60.9 | 12.3% | 14 |
| 17 | BCR-ABL (b2a2) | 293 | 79, 299 | 55.9 | 9.8% | 519, 739, 299 | 58.6 | 14.7% | 519, 956, 299 | 87.0 | 14.3% | 13 |
| 18 | BCR-ABL (b2a2) | 461 | 80, 300 | 38.4 | 9.4% | 520, 740, 300 | 35.9 | 12.1% | 520, 957, 300 | 28.6 | 10.2% | 13 |
| 19 | BCR-ABL (b2a2) | 462 | 81, 301 | 31.1 | 13.7% | 521, 741, 301 | 26.5 | 5.5% | 521, 958, 301 | 35.8 | 10.7% | 14 |
| 20 | BCR-ABL (b2a2) | 561 | 82, 302 | 17.7 | 3.4% | 522, 742, 302 | 20.7 | 3.4% | 522, 959, 302 | 35.5 | 10.6% | 12 |
| 21 | BCR-ABL (b3a2) | 352 | 83, 303 | 45.4 | 7.0% | 523, 743, 303 | 39.8 | 8.3% | 523, 960, 303 | 45.5 | 11.0% | 12 |
| 22 | BCR-ABL (b3a2) | 353 | 84, 304 | 22.6 | 1.8% | 524, 744, 304 | 20.5 | 5.1% | 524, 961, 304 | 66.1 | 17.8% | 12 |
| 23 | BCR-ABL (b3a2) | 356 | 85, 305 | 11.9 | 2.5% | 525, 745, 305 | 28.4 | 5.8% | 525, 962, 305 | 56.0 | 10.6% | 13 |
| 24 | BCR-ABL (b3a2) | 357 | 86, 306 | 24.5 | 6.0% | 526, 746, 306 | 25.6 | 7.5% | 526, 963, 306 | 39.2 | 10.0% | 13 |
| 25 | BCR-ABL (b3a2) | 359 | 87, 307 | 56.8 | 9.3% | 527, 747, 307 | 42.4 | 7.3% | 527, 964, 307 | 46.4 | 9.5% | 13 |
| 26 | BCR-ABL (b3a2) | 360 | 88, 308 | 32.3 | 5.0% | 528, 748, 308 | 37.2 | 7.3% | 528, 965, 308 | 55.3 | 13.8% | 13 |
| 27 | BCR-ABL (b3a2) | 362 | 89, 309 | 12.4 | 3.2% | 529, 737, 309 | 26.3 | 9.8% | 529, 954, 309 | 46.2 | 8.3% | 14 |
| 28 | BCR-ABL (b3a2) | 410 | 90, 310 | 66.2 | 12.2% | 530, 749, 310 | 55.9 | 11.2% | 530, 966, 310 | 58.4 | 16.4% | 12 |
| 29 | BCR-ABL (b3a2) | 629 | 91, 311 | 35.0 | 11.7% | 531, 750, 311 | 46.5 | 10.1% | 531, 967, 311 | 41.0 | 9.0% | 13 |
| 30 | BCR-ABL (b3a2) | 727 | 92, 312 | 83.4 | 13.6% | 532, 751, 312 | 76.7 | 22.5% | 532, 968, 312 | 62.9 | 10.9% | 12 |
| 31 | EGFR | 4715 | 93, 313 | 15.3 | 2.2% | 533, 752, 313 | 9.4 | 0.9% | 533, 969, 313 | 11.3 | 1.7% | 11 |
| 32 | EGFR | 4759 | 94, 314 | 3.8 | 0.4% | 534, 753, 314 | 6.3 | 0.8% | 534, 970, 314 | 8.4 | 1.1% | 12 |
| 33 | EGFR | 4810 | 95, 315 | 5.2 | 0.6% | 535, 754, 315 | 5.8 | 0.7% | 535, 971, 315 | 7.2 | 1.0% | 13 |
| 34 | EGFR | 5249 | 96, 316 | 2.6 | 0.4% | 536, 755, 316 | 16.6 | 1.8% | 536, 972, 316 | 42.9 | 3.5% | 14 |
| 35 | EGFR | 5279 | 97, 317 | 7.6 | 1.0% | 537, 756, 317 | 10.6 | 1.1% | 537, 973, 317 | 11.8 | 1.7% | 13 |
| 36 | EGFR | 5374 | 98, 318 | 9.6 | 1.0% | 538, 757, 318 | 8.7 | 0.9% | 538, 974, 318 | 34.7 | 4.3% | 12 |
| 37 | EGFR | 5442 | 99, 319 | 4.1 | 0.8% | 539, 758, 319 | 15.1 | 1.8% | 539, 975, 319 | 19.7 | 2.4% | 12 |
| 38 | EGFR | 5451 | 100, 320 | 5.1 | 0.3% | 540, 759, 320 | 11.5 | 1.3% | 540, 976, 320 | 16.5 | 3.0% | 13 |
| 39 | EGFR | 5469 | 101, 321 | 5.6 | 0.8% | 541, 760, 321 | 5.1 | 0.5% | 541, 977, 321 | 12.2 | 2.5% | 13 |
| 40 | EGFR | 5483 | 102, 322 | 2.2 | 0.4% | 542, 761, 322 | 2.4 | 0.5% | 542, 978, 322 | 6.1 | 0.7% | 9 |
| 41 | FLT1 | 863 | 103, 323 | 7.6 | 1.1% | 543, 762, 323 | 10.2 | 3.3% | 543, 979, 323 | 29.2 | 8.1% | 12 |
| 42 | FLT1 | 906 | 104, 324 | 10.0 | 2.4% | 544, 763, 324 | 10.8 | 0.8% | 544, 980, 324 | 12.4 | 2.1% | 12 |
| 43 | FLT1 | 993 | 105, 325 | 12.2 | 2.5% | 545, 764, 325 | 13.7 | 2.8% | 545, 981, 325 | 20.0 | 11.3% | 13 |
| 44 | FLT1 | 1283 | 106, 326 | 19.6 | 4.5% | 546, 765, 326 | 25.8 | 7.3% | 546, 982, 326 | 18.7 | 6.5% | 12 |
| 45 | FLT1 | 1289 | 107, 327 | 15.5 | 2.0% | 547, 766, 327 | 13.5 | 1.6% | 547, 983, 327 | 22.5 | 5.0% | 12 |
| 46 | FLT1 | 1349 | 108, 328 | 36.8 | 4.2% | 548, 767, 328 | 22.9 | 4.0% | 548, 984, 328 | 52.7 | 5.4% | 14 |
| 47 | FLT1 | 1354 | 109, 329 | 36.6 | 4.0% | 549, 768, 329 | 49.7 | 5.9% | 549, 985, 329 | 45.8 | 9.3% | 14 |
| 48 | FLT1 | 1448 | 110, 330 | 9.3 | 2.5% | 550, 769, 330 | 16.1 | 2.9% | 550, 986, 330 | 24.2 | 3.6% | 13 |
| 49 | FLT1 | 1459 | 111, 331 | 13.7 | 3.6% | 551, 770, 331 | 20.0 | 8.7% | 551, 987, 331 | 22.4 | 4.4% | 12 |
| 50 | FLT1 | 1700 | 112, 332 | 7.9 | 2.2% | 552, 771, 332 | 11.2 | 3.7% | 552, 988, 332 | 36.4 | 8.0% | 13 |
| 51 | FRAP1 | 7631 | 113, 333 | 9.5 | 2.7% | 553, 772, 333 | 23.3 | 4.9% | 553, 989, 333 | 61.8 | 18.3% | 13 |
| 52 | FRAP1 | 7784 | 114, 334 | 15.1 | 1.7% | 554, 773, 334 | 19.9 | 2.8% | 554, 990, 334 | 29.3 | 3.4% | 12 |
| 53 | FRAP1 | 7812 | 115, 335 | 11.9 | 2.9% | 555, 774, 335 | 14.4 | 3.2% | 555, 991, 335 | 28.3 | 12.7% | 11 |
| 54 | FRAP1 | 7853 | 116, 336 | 16.8 | 3.3% | 556, 775, 336 | 24.1 | 3.7% | 556, 992, 336 | 67.5 | 9.2% | 11 |
| 55 | FRAP1 | 8018 | 117, 337 | 41.1 | 9.1% | 557, 776, 337 | 19.8 | 3.3% | 557, 993, 337 | 41.8 | 9.6% | 12 |
| 56 | FRAP1 | 8102 | 118, 338 | 35.7 | 5.1% | 558, 777, 338 | 30.2 | 6.3% | 558, 994, 338 | 39.5 | 9.9% | 12 |
| 57 | FRAP1 | 8177 | 119, 339 | 21.2 | 3.9% | 559, 778, 339 | 33.2 | 9.3% | 559, 995, 339 | 47.3 | 12.3% | 14 |
| 58 | FRAP1 | 8348 | 120, 340 | 25.8 | 3.6% | 560, 779, 340 | 26.8 | 4.4% | 560, 996, 340 | 37.4 | 4.7% | 11 |
| 59 | FRAP1 | 8435 | 121, 341 | 41.1 | 6.7% | 561, 780, 341 | 54.1 | 9.5% | 561, 997, 341 | 74.9 | 8.5% | 12 |
| 60 | FRAP1 | 8542 | 122, 342 | 23.1 | 4.8% | 562, 781, 342 | 16.5 | 5.5% | 562, 998, 342 | 33.6 | 6.4% | 10 |
| 61 | HIF1A | 1780 | 123, 343 | 76.6 | 14.9% | 563, 782, 343 | 89.2 | 11.9% | 563, 999, 343 | 86.3 | 9.3% | 12 |
| 62 | HIF1A | 1831 | 124, 344 | 9.0 | 0.6% | 564, 783, 344 | 14.0 | 2.3% | 564, 1000, 344 | 38.2 | 8.5% | 12 |
| 63 | HIF1A | 1870 | 125, 345 | 21.4 | 4.5% | 565, 784, 345 | 21.2 | 3.3% | 565, 1001, 345 | 19.6 | 2.2% | 13 |
| 64 | HIF1A | 1941 | 126, 346 | 8.9 | 2.1% | 566, 785, 346 | 11.4 | 2.2% | 566, 1002, 346 | 11.7 | 2.5% | 12 |
| 65 | HIF1A | 2068 | 127, 347 | 7.8 | 1.5% | 567, 786, 347 | 7.0 | 1.4% | 567, 1003, 347 | 16.9 | 3.9% | 12 |
| 66 | HIF1A | 2133 | 128, 348 | 13.0 | 2.0% | 568, 787, 348 | 16.7 | 3.1% | 568, 1004, 348 | 16.3 | 3.1% | 10 |
| 67 | HIF1A | 2232 | 129, 349 | 8.6 | 2.0% | 569, 788, 349 | 17.4 | 3.6% | 569, 1005, 349 | 37.8 | 9.6% | 13 |
| 68 | HIF1A | 2273 | 130, 350 | 19.1 | 5.3% | 570, 789, 350 | 23.4 | 4.4% | 570, 1006, 350 | 20.3 | 3.4% | 12 |
| 69 | HIF1A | 2437 | 131, 351 | 8.2 | 1.4% | 571, 790, 351 | 47.7 | 11.5% | 571, 1007, 351 | 72.4 | 14.3% | 13 |
| 70 | HIF1A | 2607 | 132, 352 | 8.0 | 2.1% | 572, 791, 352 | 11.0 | 1.2% | 572, 1008, 352 | 33.6 | 6.0% | 13 |
| 71 | IL17A | 923 | 133, 353 | 5.0 | 0.6% | 573, 792, 353 | 7.3 | 0.7% | 573, 1009, 353 | 26.3 | 2.5% | 12 |
| 72 | IL17A | 962 | 134, 354 | 6.7 | 0.8% | 574, 793, 354 | 7.7 | 0.9% | 574, 1010, 354 | 8.9 | 2.0% | 13 |
| 73 | IL17A | 969 | 135, 355 | 8.9 | 1.7% | 575, 794, 355 | 17.1 | 1.6% | 575, 1011, 355 | 49.5 | 4.3% | 14 |
| 74 | IL17A | 1098 | 136, 356 | 7.2 | 1.3% | 576, 795, 356 | 10.0 | 2.4% | 576, 1012, 356 | 15.4 | 2.8% | 12 |
| 75 | IL17A | 1201 | 137, 357 | 14.1 | 2.2% | 577, 796, 357 | 13.4 | 1.1% | 577, 1013, 357 | 17.2 | 2.8% | 12 |
| 76 | IL17A | 1433 | 138, 358 | 107.1 | 9.7% | 578, 797, 358 | 111.5 | 10.4% | 578, 1014, 358 | 108.1 | 8.8% | 13 |
| 77 | IL17A | 1455 | 139, 359 | 115.4 | 11.1% | 579, 798, 359 | 120.8 | 8.7% | 579, 1015, 359 | 120.3 | 9.9% | 12 |
| 78 | IL17A | 1478 | 140, 360 | 82.7 | 6.3% | 580, 799, 360 | 87.6 | 5.0% | 580, 1016, 360 | 95.9 | 5.6% | 14 |
| 79 | IL17A | 1663 | 141, 361 | 140.2 | 7.8% | 581, 800, 361 | 125.9 | 9.8% | 581, 1017, 361 | 114.7 | 10.1% | 14 |
| 80 | IL17A | 1764 | 142, 362 | 114.3 | 9.2% | 582, 801, 362 | 109.4 | 2.9% | 582, 1018, 362 | 105.7 | 8.1% | 15 |
| 81 | IL18 | 210 | 143, 363 | 13.8 | 2.8% | 583, 802, 363 | 23.9 | 5.8% | 583, 1019, 363 | 21.4 | 5.7% | 14 |
| 82 | IL18 | 368 | 144, 364 | 22.5 | 1.8% | 584, 803, 364 | 21.0 | 2.0% | 584, 1020, 364 | 29.7 | 3.7% | 13 |
| 83 | IL18 | 479 | 145, 365 | 88.1 | 12.9% | 585, 804, 365 | 66.3 | 9.8% | 585, 1021, 365 | 80.0 | 16.8% | 14 |
| 84 | IL18 | 508 | 146, 366 | 8.0 | 1.9% | 586, 805, 366 | 15.7 | 3.5% | 586, 1022, 366 | 17.0 | 5.7% | 12 |
| 85 | IL18 | 521 | 147, 367 | 9.9 | 2.1% | 587, 806, 367 | 10.8 | 2.1% | 587, 1023, 367 | 18.4 | 3.3% | 11 |
| 86 | IL18 | 573 | 148, 368 | 18.6 | 4.7% | 588, 807, 368 | 24.8 | 7.6% | 588, 1024, 368 | 48.8 | 7.7% | 14 |
| 87 | IL18 | 605 | 149, 369 | 27.5 | 6.1% | 589, 808, 369 | 21.3 | 3.9% | 589, 1025, 369 | 14.9 | 2.7% | 13 |
| 88 | IL18 | 663 | 150, 370 | 5.3 | 1.0% | 590, 809, 370 | 8.2 | 1.5% | 590, 1026, 370 | 11.7 | 3.4% | 12 |
| 89 | IL18 | 785 | 151, 371 | 8.6 | 1.0% | 591, 810, 371 | 11.7 | 2.8% | 591, 1027, 371 | 21.1 | 9.1% | 12 |
| 90 | IL18 | 918 | 152, 372 | 13.9 | 1.6% | 592, 811, 372 | 15.0 | 3.0% | 592, 1028, 372 | 30.4 | 3.6% | 11 |
| 91 | IL6 | 24 | 153, 373 | 22.6 | 1.7% | 593, 812, 373 | 45.7 | 7.8% | 593, 1029, 373 | 47.8 | 4.5% | 13 |
| 92 | IL6 | 74 | 154, 374 | 52.5 | 12.6% | 594, 813, 374 | 56.4 | 7.1% | 594, 1030, 374 | 88.3 | 15.5% | 12 |
| 93 | IL6 | 160 | 155, 375 | 49.8 | 7.8% | 595, 814, 375 | 50.6 | 6.1% | 595, 1031, 375 | 68.3 | 9.4% | 14 |
| 94 | IL6 | 370 | 156, 376 | 44.7 | 8.2% | 596, 815, 376 | 52.5 | 4.2% | 596, 1032, 376 | 74.3 | 9.3% | 13 |
| 95 | IL6 | 451 | 157, 377 | 39.3 | 5.0% | 597, 816, 377 | 35.6 | 4.1% | 597, 1033, 377 | 66.6 | 7.1% | 13 |
| 96 | IL6 | 481 | 158, 378 | 68.3 | 8.1% | 598, 817, 378 | 78.7 | 15.6% | 598, 1034, 378 | 63.2 | 6.2% | 11 |
| 97 | IL6 | 710 | 159, 379 | 29.2 | 4.2% | 599, 818, 379 | 32.0 | 4.1% | 599, 1035, 379 | 77.3 | 11.4% | 12 |
| 98 | IL6 | 822 | 160, 380 | 73.7 | 11.0% | 600, 819, 380 | 72.2 | 11.6% | 600, 1036, 380 | 85.2 | 13.3% | 12 |
| 99 | IL6 | 836 | 161, 381 | 98.8 | 21.8% | 601, 820, 381 | 95.0 | 13.2% | 601, 1037, 381 | 90.5 | 15.6% | 13 |
| 100 | IL6 | 960 | 162, 382 | 31.1 | 4.4% | 602, 821, 382 | 20.5 | 6.1% | 602, 1038, 382 | 25.6 | 2.4% | 12 |
| 101 | MAP2K1 | 1237 | 163, 383 | 21.0 | 3.3% | 603, 822, 383 | 27.9 | 3.8% | 603, 1039, 383 | 50.0 | 8.8% | 11 |
| 102 | MAP2K1 | 1342 | 164, 384 | 3.9 | 0.5% | 604, 823, 384 | 8.7 | 1.5% | 604, 1040, 384 | 11.4 | 1.3% | 13 |
| 103 | MAP2K1 | 1501 | 165, 385 | 12.9 | 1.9% | 605, 824, 385 | 19.4 | 2.9% | 605, 1041, 385 | 19.7 | 5.3% | 12 |
| 104 | MAP2K1 | 1542 | 166, 386 | 7.2 | 1.3% | 606, 825, 386 | 11.7 | 2.1% | 606, 1042, 386 | 18.7 | 3.2% | 11 |
| 105 | MAP2K1 | 1544 | 167, 387 | 13.1 | 2.1% | 607, 826, 387 | 11.1 | 1.1% | 607, 1043, 387 | 16.5 | 3.0% | 10 |
| 106 | MAP2K1 | 1728 | 168, 388 | 11.9 | 1.7% | 608, 827, 388 | 11.9 | 1.0% | 608, 1044, 388 | 27.9 | 4.3% | 13 |
| 107 | MAP2K1 | 1777 | 169, 389 | 18.3 | 2.8% | 609, 828, 389 | 37.2 | 4.3% | 609, 1045, 389 | 64.5 | 8.5% | 13 |
| 108 | MAP2K1 | 1892 | 170, 390 | 34.5 | 4.7% | 610, 829, 390 | 37.6 | 6.8% | 610, 1046, 390 | 42.4 | 7.3% | 12 |
| 109 | MAP2K1 | 1954 | 171, 391 | 4.6 | 0.5% | 611, 830, 391 | 4.2 | 0.5% | 611, 1047, 391 | 6.5 | 1.1% | 13 |
| 110 | MAP2K1 | 2062 | 172, 392 | 10.2 | 0.8% | 612, 831, 392 | 10.4 | 2.9% | 612, 1048, 392 | 12.2 | 2.0% | 12 |
| 111 | MAPK1 | 3683 | 173, 393 | 7.0 | 0.9% | 613, 614, 393 | 24.4 | 17.3% | 613, 1049, 393 | 25.2 | 2.6% | 12 |
| 112 | MAPK1 | 3695 | 174, 394 | 32.9 | 4.6% | 614, 832, 394 | 30.9 | 4.0% | 614, 1050, 394 | 33.8 | 3.1% | 13 |
| 113 | MAPK1 | 3797 | 175, 395 | 7.4 | 1.1% | 615, 833, 395 | 6.4 | 1.3% | 615, 1051, 395 | 40.4 | 5.8% | 11 |
| 114 | MAPK1 | 3905 | 176, 396 | 8.0 | 1.0% | 616, 834, 396 | 8.1 | 0.5% | 616, 1052, 396 | 14.8 | 1.4% | 12 |
| 115 | MAPK1 | 3916 | 177, 397 | 11.0 | 1.7% | 617, 835, 397 | 16.0 | 3.3% | 617, 1053, 397 | 45.5 | 8.1% | 10 |
| 116 | MAPK1 | 3943 | 178, 398 | 6.8 | 0.8% | 618, 836, 398 | 6.6 | 0.7% | 618, 1054, 398 | 11.0 | 2.3% | 10 |
| 117 | MAPK1 | 4121 | 179, 399 | 7.6 | 1.1% | 619, 837, 399 | 12.7 | 1.6% | 619, 1055, 399 | 25.1 | 3.1% | 12 |
| 118 | MAPK1 | 4256 | 180, 400 | 27.6 | 2.5% | 620, 838, 400 | 36.8 | 4.0% | 620, 1056, 400 | 57.7 | 7.0% | 13 |
| 119 | MAPK1 | 4294 | 181, 401 | 31.0 | 3.0% | 621, 839, 401 | 22.3 | 3.6% | 621, 1057, 401 | 50.9 | 4.6% | 12 |
| 120 | MAPK1 | 4375 | 182, 402 | 10.9 | 1.1% | 622, 840, 402 | 12.4 | 1.4% | 622, 1058, 402 | 16.9 | 2.7% | 11 |
| 121 | MAPK14 | 2715 | 183, 403 | 11.4 | 2.8% | 623, 841, 403 | 16.5 | 4.1% | 623, 1059, 403 | 16.6 | 2.4% | 12 |
| 122 | MAPK14 | 2737 | 184, 404 | 7.5 | 0.8% | 624, 842, 404 | 10.3 | 1.1% | 624, 1060, 404 | 13.1 | 1.2% | 11 |
| 123 | MAPK14 | 2750 | 185, 405 | 8.7 | 1.0% | 625, 843, 405 | 12.2 | 1.8% | 625, 1061, 405 | 15.8 | 1.9% | 13 |
| 124 | MAPK14 | 2817 | 186, 406 | 6.4 | 0.8% | 626, 844, 406 | 14.6 | 1.7% | 626, 1062, 406 | 19.4 | 2.0% | 11 |
| 125 | MAPK14 | 3091 | 187, 407 | 9.9 | 0.6% | 627, 845, 407 | 10.3 | 1.3% | 627, 1063, 407 | 24.7 | 1.5% | 11 |
| 126 | MAPK14 | 3312 | 188, 408 | 20.4 | 1.8% | 628, 846, 408 | 30.5 | 2.9% | 628, 1064, 408 | 38.5 | 3.4% | 13 |
| 127 | MAPK14 | 3346 | 189, 409 | 20.9 | 1.6% | 629, 847, 409 | 23.0 | 2.6% | 629, 1065, 409 | 58.3 | 6.7% | 11 |
| 128 | MAPK14 | 3531 | 190, 410 | 42.4 | 3.2% | 630, 848, 410 | 55.1 | 5.0% | 630, 1066, 410 | 61.9 | 3.6% | 12 |
| 129 | MAPK14 | 3621 | 191, 411 | 28.6 | 1.9% | 631, 849, 411 | 42.4 | 13.5% | 631, 1067, 411 | 71.9 | 5.2% | 11 |
| 130 | MAPK14 | 3680 | 192, 412 | 15.6 | 1.3% | 632, 850, 412 | 15.5 | 1.9% | 632, 1068, 412 | 19.8 | 2.1% | 12 |
| 131 | PDGFA | 1322 | 193, 413 | 23.7 | 3.6% | 633, 851, 413 | 31.6 | 4.3% | 633, 1069, 413 | 38.4 | 3.3% | 12 |
| 132 | PDGFA | 1332 | 194, 414 | 35.5 | 5.4% | 634, 852, 414 | 48.4 | 3.0% | 634, 1070, 414 | 65.4 | 10.5% | 14 |
| 133 | PDGFA | 1395 | 195, 415 | 25.9 | 3.3% | 635, 853, 415 | 40.2 | 6.0% | 635, 1071, 415 | 55.2 | 9.8% | 14 |
| 134 | PDGFA | 1669 | 196, 416 | 40.4 | 5.1% | 636, 854, 416 | 29.5 | 4.3% | 636, 1072, 416 | 33.9 | 5.9% | 12 |
| 135 | PDGFA | 1676 | 197, 417 | 27.1 | 2.5% | 637, 855, 417 | 36.8 | 4.5% | 637, 1073, 417 | 47.4 | 3.4% | 13 |
| 136 | PDGFA | 1748 | 198, 418 | 27.4 | 4.7% | 638, 856, 418 | 34.5 | 5.0% | 638, 1074, 418 | 47.5 | 4.7% | 11 |
| 137 | PDGFA | 2020 | 199, 419 | 31.6 | 6.6% | 639, 857, 419 | 37.5 | 4.3% | 639, 1075, 419 | 51.9 | 5.0% | 13 |
| 138 | PDGFA | 2021 | 200, 420 | 16.7 | 1.0% | 640, 858, 420 | 24.2 | 3.1% | 640, 1076, 420 | 62.6 | 6.9% | 14 |
| 139 | PDGFA | 2030 | 201, 421 | 38.7 | 6.2% | 641, 859, 421 | 47.0 | 10.5% | 641, 1077, 421 | 80.5 | 7.6% | 13 |
| 140 | PDGFA | 2300 | 202, 422 | 55.3 | 7.7% | 642, 860, 422 | 41.2 | 4.7% | 642, 1078, 422 | 71.7 | 9.1% | 15 |
| 141 | PDGFRA | 4837 | 203, 423 | 16.9 | 3.1% | 643, 861, 423 | 21.1 | 5.1% | 643, 1079, 423 | 23.1 | 4.8% | 12 |
| 142 | PDGFRA | 4900 | 204, 424 | 23.8 | 3.8% | 644, 862, 424 | 40.9 | 8.4% | 644, 1080, 424 | 62.5 | 12.5% | 16 |
| 143 | PDGFRA | 5007 | 205, 425 | 52.6 | 9.4% | 645, 863, 425 | 49.6 | 7.7% | 645, 1081, 425 | 47.0 | 9.5% | 12 |
| 144 | PDGFRA | 5043 | 206, 426 | 30.1 | 7.9% | 646, 864, 426 | 30.0 | 5.4% | 646, 1082, 426 | 57.3 | 7.8% | 11 |
| 145 | PDGFRA | 5082 | 207, 427 | 8.3 | 1.1% | 647, 865, 427 | 11.9 | 1.8% | 647, 1083, 427 | 18.2 | 4.0% | 13 |
| 146 | PDGFRA | 5352 | 208, 428 | 6.3 | 1.4% | 648, 866, 428 | 8.2 | 1.6% | 648, 1084, 428 | 7.9 | 1.1% | 12 |
| 147 | PDGFRA | 5367 | 209, 429 | 19.1 | 5.6% | 649, 867, 429 | 10.9 | 1.6% | 649, 1085, 429 | 25.1 | 2.9% | 14 |
| 148 | PDGFRA | 5496 | 210, 430 | 18.9 | 5.4% | 650, 868, 430 | 17.0 | 2.9% | 650, 1086, 430 | 17.8 | 4.0% | 12 |
| 149 | PDGFRA | 5706 | 211, 431 | 24.5 | 4.0% | 651, 869, 431 | 47.8 | 4.3% | 651, 1087, 431 | 50.6 | 5.5% | 13 |
| 150 | PDGFRA | 5779 | 212, 432 | 13.0 | 1.4% | 652, 870, 432 | 14.0 | 2.1% | 652, 1088, 432 | 17.2 | 4.3% | 14 |
| 151 | PIK3CA | 213 | 213, 433 | 4.3 | 1.0% | 653, 871, 433 | 3.7 | 0.6% | 653, 1089, 433 | 5.7 | 0.9% | 12 |
| 152 | PIK3CA | 389 | 214, 434 | 5.3 | 1.0% | 654, 872, 434 | 7.0 | 1.5% | 654, 1090, 434 | 5.6 | 1.5% | 10 |
| 153 | PIK3CA | 517 | 215, 435 | 9.6 | 1.1% | 655, 873, 435 | 11.5 | 2.1% | 655, 1091, 435 | 13.5 | 1.6% | 11 |
| 154 | PIK3CA | 630 | 216, 436 | 6.1 | 1.2% | 656, 874, 436 | 8.9 | 2.6% | 656, 1092, 436 | 9.3 | 1.8% | 12 |
| 155 | PIK3CA | 680 | 217, 437 | 3.8 | 0.3% | 657, 875, 437 | 5.9 | 0.6% | 657, 1093, 437 | 6.9 | 1.0% | 11 |
| 156 | PIK3CA | 732 | 218, 438 | 5.7 | 1.7% | 658, 876, 438 | 15.3 | 1.5% | 658, 1094, 438 | 17.4 | 4.0% | 11 |
| 157 | PIK3CA | 736 | 219, 439 | 5.9 | 0.9% | 659, 877, 439 | 7.8 | 1.1% | 659, 1095, 439 | 6.5 | 1.4% | 12 |
| 158 | PIK3CA | 923 | 220, 440 | 5.0 | 0.7% | 660, 878, 440 | 8.5 | 1.5% | 660, 1096, 440 | 7.4 | 0.6% | 12 |
| 159 | PIK3CA | 1087 | 221, 441 | 8.1 | 2.3% | 661, 879, 441 | 8.5 | 1.6% | 661, 1097, 441 | 17.5 | 4.9% | 12 |
| 160 | PIK3CA | 1094 | 222, 442 | 13.0 | 3.8% | 662, 880, 442 | 13.0 | 2.5% | 662, 1098, 442 | 30.1 | 6.4% | 11 |
| 161 | PKN3 | 2408 | 223, 443 | 9.4 | 2.1% | 663, 881, 443 | 15.2 | 3.7% | 663, 665, 443 | 32.1 | 6.6% | 12 |
| 162 | PKN3 | 2420 | 224, 444 | 14.5 | 1.7% | 664, 882, 444 | 30.4 | 7.5% | 664, 1099, 444 | 40.1 | 6.7% | 12 |
| 163 | PKN3 | 2421 | 225, 445 | 15.2 | 2.0% | 665, 883, 445 | 20.6 | 2.7% | 665, 1100, 445 | 50.8 | 7.8% | 12 |
| 164 | PKN3 | 2425 | 226, 446 | 28.4 | 3.8% | 666, 884, 446 | 27.0 | 6.9% | 666, 1101, 446 | 36.2 | 4.8% | 15 |
| 165 | PKN3 | 2682 | 227, 447 | 30.0 | 4.6% | 667, 885, 447 | 27.1 | 2.8% | 667, 1102, 447 | 37.1 | 6.2% | 11 |
| 166 | PKN3 | 2683 | 228, 448 | 22.4 | 2.8% | 668, 886, 448 | 34.8 | 2.2% | 668, 1103, 448 | 51.9 | 7.4% | 12 |
| 167 | PKN3 | 2931 | 229, 449 | 35.1 | 4.4% | 669, 887, 449 | 57.3 | 7.8% | 669, 1104, 449 | 88.6 | 7.1% | 13 |
| 168 | PKN3 | 3063 | 230, 450 | 21.8 | 3.1% | 670, 888, 450 | 28.6 | 8.5% | 670, 1105, 450 | 40.5 | 6.2% | 12 |
| 169 | PKN3 | 3314 | 231, 451 | 9.7 | 1.8% | 671, 889, 451 | 12.0 | 1.4% | 671, 1106, 451 | 17.3 | 1.3% | 10 |
| 170 | PKN3 | 3315 | 232, 452 | 10.1 | 1.3% | 672, 890, 452 | 15.3 | 2.8% | 672, 1107, 452 | 37.4 | 3.6% | 11 |
| 171 | RAF1 | 1509 | 233, 453 | 46.2 | 9.4% | 673, 891, 453 | 51.3 | 10.7% | 673, 1108, 453 | 61.3 | 4.4% | 12 |
| 172 | RAF1 | 1512 | 234, 454 | 40.1 | 9.7% | 674, 892, 454 | 34.5 | 5.6% | 674, 1109, 454 | 62.4 | 8.6% | 13 |
| 173 | RAF1 | 1628 | 235, 455 | 48.3 | 7.9% | 675, 893, 455 | 47.4 | 7.1% | 675, 1110, 455 | 41.1 | 5.1% | 12 |
| 174 | RAF1 | 1645 | 236, 456 | 38.9 | 2.3% | 676, 894, 456 | 62.1 | 9.0% | 676, 1111, 456 | 85.0 | 9.3% | 13 |
| 175 | RAF1 | 1780 | 237, 457 | 22.6 | 4.9% | 677, 895, 457 | 24.8 | 5.3% | 677, 1112, 457 | 37.6 | 10.4% | 12 |
| 176 | RAF1 | 1799 | 238, 458 | 23.2 | 3.1% | 678, 896, 458 | 43.6 | 7.6% | 678, 1113, 458 | 50.7 | 6.2% | 12 |
| 177 | RAF1 | 1807 | 239, 459 | 28.0 | 5.4% | 679, 897, 459 | 34.8 | 5.8% | 679, 1114, 459 | 37.0 | 5.3% | 15 |
| 178 | RAF1 | 1863 | 240, 460 | 28.2 | 3.1% | 680, 898, 460 | 38.1 | 4.5% | 680, 1115, 460 | 35.7 | 4.2% | 14 |
| 179 | RAF1 | 2157 | 241, 461 | 68.8 | 6.5% | 681, 899, 461 | 64.1 | 8.0% | 681, 1116, 461 | 86.7 | 12.6% | 14 |
| 180 | RAF1 | 2252 | 242, 462 | 11.4 | 1.7% | 682, 900, 462 | 25.8 | 5.4% | 682, 1117, 462 | 71.2 | 10.7% | 13 |
| 181 | SRD5A1 | 1150 | 243, 463 | 3.7 | 0.5% | 683, 901, 463 | 4.4 | 0.7% | 683, 1118, 463 | 3.8 | 0.4% | 12 |
| 182 | SRD5A1 | 1153 | 244, 464 | 3.2 | 0.4% | 684, 902, 464 | 5.2 | 0.5% | 684, 1119, 464 | 7.0 | 0.9% | 12 |
| 183 | SRD5A1 | 1845 | 245, 465 | 3.9 | 0.5% | 685, 903, 465 | 4.5 | 0.6% | 685, 1120, 465 | 7.4 | 0.8% | 13 |
| 184 | SRD5A1 | 1917 | 246, 466 | 9.4 | 0.8% | 686, 904, 466 | 10.2 | 1.3% | 686, 1121, 466 | 22.0 | 2.8% | 12 |
| 185 | SRD5A1 | 1920 | 247, 467 | 4.6 | 0.3% | 687, 905, 467 | 4.9 | 1.0% | 687, 1122, 467 | 6.4 | 0.5% | 11 |
| 186 | SRD5A1 | 1964 | 248, 468 | 6.2 | 0.7% | 688, 906, 468 | 10.4 | 0.7% | 688, 1123, 468 | 21.0 | 4.6% | 10 |
| 187 | SRD5A1 | 1981 | 249, 469 | 6.5 | 1.0% | 689, 907, 469 | 7.1 | 0.7% | 689, 1124, 469 | 8.8 | 1.5% | 12 |
| 188 | SRD5A1 | 2084 | 250, 470 | 16.9 | 1.1% | 690, 908, 470 | 15.7 | 1.5% | 690, 1125, 470 | 13.3 | 1.5% | 12 |
| 189 | SRD5A1 | 2085 | 251, 471 | 17.3 | 1.6% | 691, 909, 471 | 19.4 | 1.7% | 691, 1126, 471 | 20.8 | 2.6% | 12 |
| 190 | SRD5A1 | 2103 | 252, 472 | 7.5 | 1.3% | 692, 910, 472 | 10.9 | 1.2% | 692, 1127, 472 | 12.3 | 1.7% | 12 |
| 191 | TNF | 32 | 253, 473 | 71.4 | 13.2% | 693, 911, 473 | 93.7 | 14.9% | 693, 1128, 473 | 122.6 | 21.1% | 12 |
| 192 | TNF | 649 | 254, 474 | 100.0 | 16.3% | 694, 912, 474 | 127.7 | 12.6% | 694, 1129, 474 | 147.9 | 21.7% | 12 |
| 193 | TNF | 802 | 255, 475 | 67.2 | 10.7% | 695, 913, 475 | 64.0 | 6.6% | 695, 1130, 475 | 116.4 | 21.0% | 12 |
| 194 | TNF | 875 | 256, 476 | 101.7 | 19.9% | 696, 914, 476 | 99.3 | 15.5% | 696, 1131, 476 | 108.8 | 14.2% | 12 |
| 195 | TNF | 983 | 257, 477 | 94.5 | 7.0% | 697, 915, 477 | 83.1 | 7.3% | 697, 1132, 477 | 140.6 | 20.4% | 11 |
| 196 | TNF | 987 | 258, 478 | 82.0 | 10.9% | 698, 916, 478 | 139.4 | 8.2% | 698, 1133, 478 | 143.8 | 9.2% | 10 |
| 197 | TNF | 992 | 259, 479 | 126.7 | 15.8% | 699, 700, 479 | 121.7 | 10.8% | 699, 1134, 479 | 115.9 | 16.4% | 11 |
| 198 | TNF | 1003 | 260, 480 | 123.4 | 16.7% | 700, 917, 480 | 114.4 | 47.8% | 700, 1135, 480 | 98.5 | 17.2% | 14 |
| 199 | TNF | 1630 | 261, 481 | 58.0 | 5.7% | 701, 918, 481 | 56.1 | 9.4% | 701, 1136, 481 | 71.0 | 17.2% | 11 |
| 200 | TNF | 1631 | 262, 482 | 54.2 | 13.4% | 702, 919, 482 | 63.9 | 10.1% | 702, 1137, 482 | 73.8 | 14.8% | 11 |
| 201 | TNFSF13B | 188 | 263, 483 | 20.4 | 3.2% | 703, 920, 483 | 46.2 | 11.9% | 703, 1138, 483 | 58.4 | 12.7% | 13 |
| 202 | TNFSF13B | 313 | 264, 484 | 15.9 | 5.1% | 704, 921, 484 | 18.9 | 7.4% | 704, 1139, 484 | 48.0 | 8.1% | 12 |
| 203 | TNFSF13B | 337 | 265, 485 | 22.3 | 4.6% | 705, 922, 485 | 37.1 | 11.0% | 705, 1140, 485 | 63.6 | 10.4% | 12 |
| 204 | TNFSF13B | 590 | 266, 486 | 35.8 | 8.7% | 706, 923, 486 | 49.4 | 11.0% | 706, 1141, 486 | 50.7 | 10.3% | 10 |
| 205 | TNFSF13B | 652 | 267, 487 | 21.3 | 7.2% | 707, 924, 487 | 57.6 | 16.7% | 707, 1142, 487 | 78.8 | 5.6% | 14 |
| 206 | TNFSF13B | 661 | 268, 488 | 28.8 | 3.0% | 708, 925, 488 | 38.3 | 8.4% | 708, 1143, 488 | 56.5 | 16.3% | 12 |
| 207 | TNFSF13B | 684 | 269, 489 | 46.3 | 7.2% | 709, 926, 489 | 43.8 | 9.7% | 709, 1144, 489 | 54.5 | 4.6% | 12 |
| 208 | TNFSF13B | 905 | 270, 490 | 18.5 | 5.0% | 710, 927, 490 | 27.9 | 3.1% | 710, 1145, 490 | 51.7 | 10.9% | 12 |
| 209 | TNFSF13B | 961 | 271, 491 | 21.4 | 4.0% | 711, 928, 491 | 37.5 | 10.1% | 711, 1146, 491 | 77.6 | 11.2% | 14 |
| 210 | TNFSF13B | 1150 | 272, 492 | 24.1 | 7.0% | 712, 929, 492 | 23.4 | 5.7% | 712, 1147, 492 | 35.9 | 8.0% | 13 |
| 211 | VEGFA | 1426 | 273, 493 | 14.5 | 2.2% | 713, 930, 493 | 18.1 | 3.2% | 713, 1148, 493 | 21.0 | 3.8% | 13 |
| 212 | VEGFA | 1428 | 274, 494 | 18.5 | 2.6% | 714, 931, 494 | 32.1 | 5.8% | 714, 1149, 494 | 46.7 | 9.4% | 12 |
| 213 | VEGFA | 1603 | 275, 495 | 14.6 | 2.1% | 715, 932, 495 | 36.6 | 17.5% | 715, 1150, 495 | 65.6 | 6.9% | 13 |
| 214 | VEGFA | 1685 | 276, 496 | 17.1 | 1.3% | 716, 933, 496 | 20.2 | 5.5% | 716, 1151, 496 | 23.4 | 3.8% | 13 |
| 215 | VEGFA | 1792 | 277, 497 | 17.0 | 1.8% | 717, 934, 497 | 21.2 | 3.2% | 717, 1152, 497 | 39.5 | 6.3% | 12 |
| 216 | VEGFA | 2100 | 278, 498 | 116.9 | 11.5% | 718, 935, 498 | 103.6 | 7.5% | 718, 1153, 498 | 101.5 | 12.9% | 12 |
| 217 | VEGFA | 2102 | 279, 499 | 116.3 | 9.1% | 719, 936, 499 | 110.2 | 9.3% | 719, 1154, 499 | 105.0 | 8.0% | 12 |
| 218 | VEGFA | 2196 | 280, 500 | 24.2 | 2.7% | 720, 937, 500 | 26.6 | 3.1% | 720, 1155, 500 | 43.5 | 3.5% | 12 |
| 219 | VEGFA | 2261 | 281, 501 | 15.6 | 2.2% | 721, 938, 501 | 44.2 | 6.2% | 721, 1156, 501 | 109.0 | 9.8% | 12 |
| 220 | VEGFA | 2292 | 282, 502 | 48.4 | 4.3% | 722, 939, 502 | 45.1 | 7.2% | 722, 1157, 502 | 80.7 | 6.7% | 15 |

*All samples were normalized to the respective dsRNA QNeg (Qiagen) negative control samples run in the same experiment. That is, QNeg values were set as 100% active (i.e., no knockdown), with 95% confidence intervals (CI) ranging from 6.3-22.5%. As a positive control, an siRNA specific for rLuc was used, which samples showed on average expression levels that varied from 1.2% to 16.8% (i.e., about 83% to about 99% knockdown activity and a 95% CI ranging from 0.3% to 13.7%).
†“Pos” refers to the position on the target gene mRNA message that aligns with the 5′-end of the dsRNA sense strand. The mRNA numbering is based on the GenBank accession numbers as described herein.
‡The SEQ ID NOS. are provided in the following order: (1) Dicer: sense strand, antisense strand; (2) Nicked: 5′-sense strand fragment, 3′-sense strand fragment, and antisense strand; and (3) Gapped: 5′-sense strand fragment, 3′-sense strand fragment, and antisense strand. The Dicer dsRNA has two strands, while ndsRNA and gdsRNA have three strands each. The nicked or gapped sense strand fragments have three locked nucleic acids each.
\hat{ }“Length 5′-S” refers to the length of the 5′-sense strand fragment of the nicked or gapped mdRNA, which indicates the position of the nick (e.g., 10 means the nick is between position 10 and 11, so the 5′sense strand fragment is 10 nucleotides long and the 3′-sense strand fragment is 15 nucelotides long) or one nucleotide gap (e.g., 10 means the missing nucleotide is number 11, so the 5′sense strand fragment is 10 nucleotides long and the 3′-sense strand fragment is 14 nucelotides long).

### Example 2

### Knockdown of β-Galactosidase Activity by Gapped dsRNA Dicer Substrate

[0196] The activity of a Dicer substrate dsRNA containing a gap in the double-stranded structure in silencing LacZ mRNA as compared to the normal Dicer substrate dsRNA (i.e., not having a gap) was examined

Nucleotide Sequences of dsRNA and mdRNA Targeting LacZ mRNA

[0197] The nucleic acid sequence of the one or more sense strands, and the antisense strand of the dsRNA and gapped dsRNA (also referred to herein as a meroduplex or mdRNA) are shown below and were synthesized using standard techniques. The RISC activator LacZ dsRNA comprises a 21 nucleotide sense strand and a 21 nucleotide antisense strand, which can anneal to form a double-stranded region of 19 base pairs with a two deoxythymidine overhang on each strand (referred to as 21/21 dsRNA).

| LacZ dsRNA (21/21)-RISC Activator | |
|---|---|
| Sense | |
| 5′-CUACACAAAUCAGCGAUUUdTdT-3′ | (SEQ ID NO: 1) |
| Antisense | |
| 3′-dTdTGAUGUGUUUAGUCGCUAAA-5′ | (SEQ ID NO: 2) |

[0198] The Dicer substrate LacZ dsRNA comprises a 25 nucleotide sense strand and a 27 nucleotide antisense strand, which can anneal to form a double-stranded region of 25 base pairs with one blunt end and a cytidine and uridine overhang on the other end (referred to as 25/27 dsRNA).

LacZ dsRNA (25/27)-Dicer Substrate

| | |
|---|---|
| Sense | |
| 5′-CUACACAAAUCAGCGAUUUCCAUdGdT-3′ | (SEQ ID NO: 3) |
| Antisense | |
| 3′-CUGAUGUGUUUAGUCGCUAAAGGUA C A-5′ | (SEQ ID NO: 4) |

The LacZ mdRNA comprises two sense strands of 13 nucleotides (5′-portion) and 11 nucleotides (3′-portion) and a 27 nucleotide antisense strand, which three strands can anneal to form two double-stranded regions of 13 and 11 base pairs separated by a single nucleotide gap (referred to as a 13, 11/27 mdRNA). The 5′-end of the 11 nucleotide sense strand fragment may be optionally phosphorylated. The “*” indicates a gap—in this case, a single nucleotide gap (i.e., a cytidine is missing).

LacZ mdRNA (13, 11/27)-Dicer Substrate

(SEQ ID NOS: 5, 6)

| | |
|---|---|
| Sense | 5′-CUACACAAAUCAG*GAUUUCCAUdGdT-3′ |

(SEQ ID NO: 4)

| | |
|---|---|
| Antisense | 3′-CUGAUGUGUUUAGUCGCUAAAGGUA C A-5′ |

Each of the LacZ dsRNA or mdRNA was used to transfect 9lacZ/R cells.

### Transfection

[0199] Six well collagen-coated plates were seeded with 5×10⁵ 9lacZ/R cells/well in a 2 ml volume per well, and incubated overnight at 37° C./5% CO₂ in DMEM/high glucose media. Preparation for transfection: 250 μl of OPTIMEM media without serum was mixed with 5 μl of 20 pmol/μl dsRNA and 5 μl of HIPERFECT transfection solution (Qiagen) was mixed with another 250 μl OPTIMEM media. After both mixtures were allowed to equilibrate for 5 minutes, the RNA and transfection solutions were combined and left at room temperature for 20 minutes to form transfection complexes. The final concentration of HIPERFECT was 50 μM, and the dsRNAs were tested at 0.05 nM, 0.1 nM, 0.2 nM, 0.5 nM, 1 nM, 2 nM, 5 nM, and 10 nM, while the mdRNA was tested at 0.2 nM, 0.5 nM, 1 nM, 2 nM, 5 nM, 10 nM, 20 nM, and 50 nM. Complete media was removed, the cells were washed with incomplete OPTIMEM, and then 500 μl transfection mixture was applied to the cells, which were incubated with gentle shaking at 37° C. for 4 hours. After transfecting, the transfection media was removed, cells were washed once with complete DMEM/high glucose media, fresh media added, and the cells were then incubated for 48 hours at 37° C., 5% CO₂.

### β-Galactosidase Assay

[0200] Transfected cells were washed with PBS, and then detached with 0.5 ml trypsin/EDTA. The detached cells were suspended in 1 ml complete DMEM/high glucose and transferred to a clean tube. The cells were harvested by centrifugation at 250×g for 5 minutes, and then resuspended in 50 μl 1× lysis buffer at 4° C. The lysed cells were subjected to two freeze-thaw cycles on dry ice and a 37° C. water bath. The lysed samples were centrifuged for 5 minutes at 4° C. and the supernatant was recovered. For each sample, 1.5 μl and 10 μl of lysate was transferred to a clean tube and sterile water added to a final volume of 30 μl followed by the addition of 70 μl o-nitrophenyl-β-D-galactopyranose (ONPG) and 200 μl 1× cleavage buffer with β-mercaptoethanol. The samples were mixed briefly, incubated for 30 minutes at 37° C., and then 500 μl stop buffer was added (final volume 800 μl). β-Galactosidase activity for each sample was measured in disposable cuvettes at 420 nm. Protein concentration was determined by the BCA (bicinchoninic acid) method. For the purpose of the instant example, the level of measured LacZ activity was correlated with the quantity of LacZ transcript within 9 L/LacZ cells. Thus, a reduction in β-galactosidase activity after dsRNA transfection, absent a negative impact on cell viability, was attributed to a reduction in the quantity of LacZ transcripts resulting from targeted degradation mediated by the LacZ dsRNA.

### Results

[0201] Knockdown activity in transfected and untransfected cells was normalized to a Qneg control dsRNA and presented as a normalized value of the Qneg control (i.e., Qneg represented 100% or “normal” gene expression levels). Both the lacZ RISC activator and Dicer substrate dsRNAs molecule showed good knockdown of β-galactosidase activity at concentration as low as 0.1 nM (FIG. 2), while the Dicer substrate antisense strand alone (single stranded 27mer) had no silencing effect. Surprisingly, a gapped mdRNA showed good knockdown although somewhat lower than that of intact RISC activator and Dicer substrate dsRNAs (FIG. 2). The presence of the gapmer cytidine (i.e., the missing nucleotide) at various concentrations (0.1 μM to 50 μM) had no effect on the activity of the mdRNA (data not shown). None of the dsRNA or mdRNA solutions showed any detectable toxicity in the transfected 9 L/LacZ cells. The IC₅₀ of the lacZ mdRNA was calculated to be 3.74 nM, which is about 10 fold lower than what had been previously measured for lacZ dsRNA 21/21 (data not shown). These results show that a meroduplex (gapped dsRNA) is capable of inducing gene silencing.

### Example 3

### Knockdown of Influenza Gene Expression by Nicked dsRNA

[0202] The activity of a nicked dsRNA (21/21) in silencing influenza gene expression as compared to a normal dsRNA (i.e., not having a nick) was examined

Nucleotide Sequences of dsRNA and mdRNA Targeting Influenza mRNA

[0203] The dsRNA and nicked dsRNA (another form of meroduplex, referred to herein as ndsRNA) are shown below and were synthesized using standard techniques. The RISC activator influenza G1498 dsRNA comprises a 21 nucleotide sense strand and a 21 nucleotide antisense strand, which can anneal to form a double-stranded region of 19 base pairs with a two deoxythymidine overhang on each strand.

| G1498-wt dsRNA (21/21) | |
|---|---|
| Sense | |
| 5′-GGAUCUUAUUUCUUCGGAGdTdT-3′ | (SEQ ID NO: 7) |
| Antisense | |
| 3′-dTdTCCUAGAAUAAAGAAGCCUC-5′ | (SEQ ID NO: 8) |

[0204] The RISC activator influenza G1498 dsRNA was nicked on the sense strand after nucleotide 11 to produce a ndsRNA having two sense strands of 11 nucleotides (5′-portion, italic) and 10 nucleotides (3′-portion) and a 21 nucleotide antisense strand, which three strands can anneal to form two double-stranded regions of 11 (shown in italics) and 10 base pairs separated by a one nucleotide gap (which may be referred to as G1498 11, 10/21 ndsRNA-wt). The 5′-end of the 10 nucleotide sense strand fragment may be optionally phosphorylated, as depicted by a “p” preceding the nucleotide (e.g., pC).

| | |
|---|---|
| G1498 ndsRNA-wt (11, 10/21) | |
| Sense | |
| 5′-GGAUCUUAUUUCUUCGGAGdTdT-3′ | (SEQ ID NO: 9, 10) |
| Antisense | |
| 3′-dTdTCCUAGAAUAAAGAAGCCUC-5′ | (SEQ ID NO: 8) |
| G1498 ndsRNA-wt (11, 10/21) | |
| Sense | |
| 5′-GGAUCUUAUUUpCUUCGGAGdTdT-3′ | (SEQ ID NOS: 9, 10) |
| Antisense | |
| 3′-dTdTCCUAGAAUAAAGAAGCCUC-5′ | (SEQ ID NO: 8) |

In addition, each of these G1498 dsRNAs were made with each U substituted with a 5-methyluridine (ribothymidine) and are referred to as G1498 dsRNA-rT. Each of the G1498 dsRNA or ndsRNA (meroduplex), with or without the 5-methyluridine substitution, was used to transfect HeLa S3 cells having an influenza target sequence associated with a luciferase gene. Also, the G1498 antisense strand alone or the antisense strand annealed to the 11 nucleotide sense strand portion alone or the 10 nucleotide sense strand portion alone were examined for activity.

### Transfection and Dual Luciferase Assay

[0205] The reporter plasmid psiCHECK™-2 (Promega, Madison, Wis.), which constitutively expresses both firefly luc2 (Photinus pyralis) and Renilla (Renilla reniformis, also known as sea pansy) luciferases, was used to clone in a portion of the influenza NP gene downstream of the Renilla translational stop codon that results in a Renilla-influenza NP fusion mRNA. The firefly luciferase in the psiCHECK™-2 vector is used to normalize Renilla luciferase expression and serves as a control for transfection efficiency.

[0206] Multi-well plates were seeded with HeLa S3 cells/well in 100 μl Ham's F12 medium and 10% fetal bovine serum, and incubated overnight at 37° C./5% CO₂. The HeLa S3 cells were transfected with the psiCHECK™-influenza plasmid (75 ng) and G1498 dsRNA or ndsRNA (final concentration of 10 nM or 100 nM) formulated in Lipofectamine™ 2000 and OPTIMEM reduced serum medium. The transfection mixture was incubated with the HeLa S3 cells with gentle shaking at 37° C. for about 18 to 20 hours.

[0207] After transfecting, firefly luciferase reporter activity was measured first by adding Dual-Glo™ Luciferase Reagent (Promega, Madison, Wis.) for 10 minutes with shaking, and then quantitating the luminescent signal using a VICTOR³™ 1420 Multilabel Counter (PerkinElmer, Waltham, Mass.). After measuring the firefly luminescence, Stop & Glo® Reagent (Promega, Madison, Wis.) was added for 10 minutes with shaking to simultaneously quench the firefly reaction and initiate the Renilla luciferase reaction, and then the Renilla luciferase luminescent signal was quantitated VICTOR³™ 1420 Multilabel Counter (PerkinElmer, Waltham, Mass.).

### Results

[0208] Knockdown activity in transfected and untransfected cells was normalized to a Qneg control dsRNA and presented as a normalized value of the Qneg control (i.e., Qneg represented 100% or “normal” gene expression levels). Thus, a smaller value indicates a greater knockdown effect. The G1498 dsRNA-wt and dsRNA-rT showed similar good knockdown at a 100 nM concentration (FIG. 3). Surprisingly, the G1498 ndsRNA-rT, whether phosphorylated or not, showed good knockdown although somewhat lower than the G1498 dsRNA-wt (FIG. 3). Similar results were obtained with dsRNA or ndsRNA at 10 nM (data not shown). None of the G1498 dsRNA or ndsRNA solutions showed any detectable toxicity in HeLa S3 cells at either 10 nM or 100 nM. Even the presence of only half a nicked sense strand (an 11 nucleotide or 10 nucleotide strand alone) with a G1498 antisense strand showed some detectable activity. These results show that a nicked-type meroduplex dsRNA molecule is unexpectedly capable of promoting gene silencing.

### Example 4

### Knockdown Activity of Nicked mdRNA

[0209] In this example, the activity of a dicer substrate LacZ dsRNA of Example 1 having a sense strand with a nick at various positions was examined In addition, a dideoxy nucleotide (i.e., ddG) was incorporated at the 5′-end of the 3′-most strand of a sense sequence having a nick or a single nucleotide gap to determine whether the in vivo ligation of the nicked sense strand is “rescuing” activity. The ddG is not a substrate for ligation. Also examined was the influenza dicer substrate dsRNA of Example 7 having a sense strand with a nick at one of positions 8 to 14. The “p” designation indicates that the 5′-end of the 3′-most strand of the nicked sense influenza sequence was phosphorylated. The “L” designation indicates that the G at position 2 of the 5′-most strand of the nicked sense influenza sequence was substituted for a locked nucleic acid G. The Qneg is a negative control dsRNA.

[0210] The dual fluorescence assay of Example 3 was used to measure knockdown activity with 5 nM of the LacZ sequences and 0.5 nM of the influenza sequences. The lacZ dicer substrate (25/27, LacZ-DS) and lacZ RISC activator (21/21, LacZ) are equally active, and the LacZ-DS can be nicked in any position between 8 and 14 without affecting activity (FIG. 3). In addition, the inclusion of a ddG on the 5′-end of the 3′-most LacZ sense sequence having a nick (LacZ:DSNkd13-3′dd) or a one nucleotide gap (LacZ:DSNkd13D1-3′dd) was essentially as active as the unsubstituted sequence (FIG. 4). The influenza dicer substrate (G1498DS) nicked at any one of positions 8 to 14 was also highly active (FIG. 5). Phosphorylation of the 5′-end of the 3′-most strand of the nicked sense influenza sequence had essentially no effect on activity, but addition of a locked nucleic acid appears to improve activity.

### Example 5

### Mean Inhibitory Concentration of mdRNA

[0211] In this example, a dose response assay was performed to measure the mean inhibitory concentration (IC₅₀) of the influenza dicer substrate dsRNA of Example 8 having a sense strand with a nick at position 12, 13, or 14, including or not a locked nucleic acid. The dual luciferase assay of Example 2 was used. The influenza dicer substrate dsRNA (G1498DS) was tested at 0.0004 nM, 0.002 nM, 0.005 nM, 0.019 nM, 0.067 nM, 0.233 nM, 0.816 nM, 2.8 nM, and 10 nM, while the mdRNA with a nick at position 13 (G1498DS:Nkd13) was tested at 0.001 nM, 0.048 nM, 0.167 nM, 1 nM, 2 nM, 7 nM, and 25 nM (see FIG. 6). Also tested were RISC activator molecules (21/21) with or without a nick at various positions (including G1498DS:Nkd11, G1498DS:Nkd12, and G1498DS:Nkd14), each of the nicked versions with a locked nucleic acid as described above (data not shown). The Qneg is a negative control dsRNA.

[0212] The IC₅₀ of the RISC activator G1498 was calculated to be about 22 pM, while the dicer substrate G1498DS IC₅₀ was calculated to be about 6 pM. The IC₅₀ of RISC and Dicer mdRNAs range from about 200 pM to about 15 nM. The inclusion of a single locked nucleic acid reduced the IC₅₀ of Dicer mdRNAs by up 4 fold (data not shown). These results show that a meroduplex dsRNA having a nick or gap in any position is capable of inducing gene silencing.

### Example 6

### Knockdown Activity of Gapped mdRNA

[0213] The activity of an influenza dicer substrate dsRNA having a sense strand with a gap of differing sizes and positions was examined. The influenza dicer substrate dsRNA of Example 8 was generated with a sense strand having a gap of 0 to 6 nucleotides at position 8, a gap of 4 nucleotides at position 9, a gap of 3 nucleotides at position 10, a gap of 2 nucleotides at position 11, and a gap of 1 nucleotide at position 12 (see Table 2). The Qneg is a negative control dsRNA. Each of the mdRNAs was tested at a concentration of 5 nM (data not shown) and 10 nM. The mdRNAs have the following antisense strand 5′-CAUUGUCUCCGAAGAAAUAAGAUCCUU (SEQ ID NO:11), and nicked or gapped sense strands as shown in Table 2.

TABLE 2

| | | | | | |
|---|---|---|---|---|---|
| | 5′ Sense* | | Gap | Gap | % |
| mdRNA | (SEQ ID NO.) | 3′ Sense (SEQ ID NO.) | Pos | Size | KD^{†} |

| | | | | | |
|---|---|---|---|---|---|
| G1498: DSNkd8 | GGAUCUUA (12) | UUUCUUCGGAGACAAdTdG (13) | 8 | 0 | 67.8 |
| G1498: DSNkd8D1 | GGAUCUUA (12) | UUCUUCGGAGACAAdTdG (14) | 8 | 1 | 60.9 |
| G1498: DSNkd8D2 | GGAUCUUA (12) | UCUUCGGAGACAAdTdG (15) | 8 | 2 | 48.2 |
| G1498: DSNkd8D3 | GGAUCUUA (12) | CUUCGGAGACAAdTdG (16) | 8 | 3 | 44.1 |
| G1498: DSNkd8D4 | GGAUCUUA (12) | UUCGGAGACAAdTdG (17) | 8 | 4 | 30.8 |
| G1498: DSNkd8D5 | GGAUCUUA (12) | UCGGAGACAAdTdG (18) | 8 | 5 | 10.8 |
| G1498: DSNkd8D6 | GGAUCUUA (12) | CGGAGACAAdTdG (19) | 8 | 6 | 17.9 |
| G1498: DSNkd9D4 | GGAUCUUAU (20) | UCGGAGACAAdTdG (18) | 9 | 4 | 38.9 |
| G1498: DSNkd10D3 | GGAUCUUAUU (21) | UCGGAGACAAdTdG (18) | 10 | 3 | 38.4 |
| G1498: DSNkd11D2 | GGAUCUUAUUU (22) | UCGGAGACAAdTdG (18) | 11 | 2 | 46.2 |
| G1498: DSNkd12D1 | GGAUCUUAUUUC (23) | UCGGAGACAAdTdG (18) | 12 | 1 | 49.6 |
| Plasmid | — | — | — | — | 5.3 |

*G indicates a locked nucleic acid G in the 5′ sense strand.
^{†}% KD means percent knockdown activity.

[0214] The dual fluorescence assay of Example 2 was used to measure knockdown activity. Similar results were obtained at both the 5 nM and 10 nM concentrations. These data show that an mdRNA having a gap of up to 6 nucleotides still has activity, although having four or fewer missing nucleotides shows the best activity (see, also, FIG. 7). Thus, mdRNA having various sizes gaps that are in various different positions have knockdown activity.

[0215] To examine the general applicability of a sequence having a sense strand with a gap of differing sizes and positions, a different dsRNA sequence was tested. The lacZ RISC dsRNA of Example 1 was generated with a sense strand having a gap of 0 to 6 nucleotides at position 8, a gap of 5 nucleotides at position 9, a gap of 4 nucleotides at position 10, a gap of 3 nucleotides at position 11, a gap of 2 nucleotides at position 12, a gap of 1 nucleotide at position 12, and a nick (gap of 0) at position 14 (see Table 3). The Qneg is a negative control dsRNA. Each of the mdRNAs was tested at a concentration of 5 nM (data not shown) and 25 nM. The lacZ mdRNAs have the following antisense strand 5′-AAAUCGCUGAUUUGUGUAGdTdTUAAA (SEQ ID NO:2) and nicked or gapped sense strands as shown in Table 3.

TABLE 3

| | 5′ Sense* | | Gap | Gap |
|---|---|---|---|---|
| mdRNA | (SEQ ID NO.) | 3′ Sense (SEQ ID NO.) | Pos | Size |
| LacZ: Nkd8 | CUACACAA (24) | AUCAGCGAUUUdTdT (25) | 8 | 0 |
| LacZ: Nkd8D1 | CUACACAA (24) | UCAGCGAUUUdTdT (26) | 8 | 1 |
| LacZ: Nkd8D2 | CUACACAA (24) | CAGCGAUUUdTdT (27) | 8 | 2 |
| LacZ: Nkd8D3 | CUACACAA (24) | AGCGAUUUdTdT (28) | 8 | 3 |
| LacZ: Nkd8D4 | CUACACAA (24) | GCGAUUUdTdT (29) | 8 | 4 |
| LacZ: Nkd8D5 | CUACACAA (24) | CGAUUUdTdT (30) | 8 | 5 |
| LacZ: Nkd8D6 | CUACACAA (24) | GAUUUdTdT (31) | 8 | 6 |
| LacZ: Nkd9D5 | CUACACAAA (32) | GAUUUdTdT (31) | 9 | 5 |
| LacZ: Nkd10D4 | CUACACAAAU (33) | GAUUUdTdT (31) | 10 | 4 |
| LacZ: Nkd11D3 | CUACACAAAUC (34) | GAUUUdTdT (31) | 11 | 3 |
| LacZ: Nkd12D2 | CUACACAAAUCA (35) | GAUUUdTdT (31) | 12 | 2 |
| LacZ: Nkd13D1 | CUACACAAAUCAG (36) | GAUUUdTdT (31) | 13 | 1 |
| LacZ: Nkd14 | CUACACAAAUCAGC (37) | GAUUUdTdT (31) | 14 | 0 |

*A indicates a locked nucleic acid A in each sense strand.

[0216] The dual fluorescence assay of Example 3 was used to measure knockdown activity. FIG. 8 shows that an mdRNA having a gap of up to 6 nucleotides has substantial activity and the position of the gap may affect the potency of knockdown. Thus, mdRNA having various sizes gaps that are in various different positions and in different mdRNA sequences have knockdown activity.

### Example 7

### Knockdown Activity of Substituted mdRNA

[0217] The activity of an influenza dsRNA RISC sequences having a nicked sense strand and the sense strands having locked nucleic acid substitutions were examined. The influenza RISC sequence G1498 of Example 3 was generated with a sense strand having a nick at positions 8 to 14 counting from the 5′-end. Each sense strand was substituted with one or two locked nucleic acids as shown in Table 4. The Qneg and Plasmid are negative controls. Each of the mdRNAs was tested at a concentration of 5 nM. The antisense strand used was 5′-CUCCGAAGAAAUAAGAUCCdTdT (SEQ ID NO:8).

TABLE 4

| | | | | |
|---|---|---|---|---|
| | | | Nick | % |
| mdRNA | 5′ Sense* (SEQ ID NO.) | 3′ Sense* (SEQ ID NO.) | Pos | KD |

| | | | | |
|---|---|---|---|---|
| G1498-wt | GGAUCUUAUUUCUUCGGAGdTdT (7) | — | — | 85.8 |
| G1498-L | GGAUCUUAUUUCUUCGGAGdTdT (61) | — | — | 86.8 |
| G1498: Nkd8-1 | GGAUCUUA (12) | UUUCUUCGGAGdTdT (47) | 8 | 36.0 |
| G1498: Nkd8-2 | GGAUCUUA (40) | UUUCUUCGGAGdTdT (54) | 8 | 66.2 |
| G1498: Nkd9-1 | GGAUCUUAU (20) | UUCUUCGGAGdTdT (48) | 9 | 60.9 |
| G1498: Nkd9-2 | GGAUCUUAU (41) | UUCUUCGGAGdTdT (55) | 9 | 64.4 |
| G1498: Nkd10-1 | GGAUCUUAUU (21) | UCUUCGGAGdTdT (49) | 10 | 58.2 |
| G1498: Nkd10-2 | GGAUCUUAUU (42) | UCUUCGGAGdTdT (56) | 10 | 68.5 |
| G1498: Nkd11-1 | GGAUCUUAUUU (22) | CUUCGGAGdTdT (50) | 11 | 75.9 |
| G1498: Nkd11-2 | GGAUCUUAUUU (43) | CUUCGGAGdTdT (57) | 11 | 67.1 |
| G1498: Nkd12-1 | GGAUCUUAUUUC (23) | UUCGGAGdTdT (51) | 12 | 59.9 |
| G1498: Nkd12-2 | GGAUCUUAUUUC (44) | UUCGGAGdTdT (58) | 12 | 72.8 |
| G1498: Nkd13-1 | GGAUCUUAUUUCU (38) | UCGGAGdTdT (52) | 13 | 37.1 |
| G1498: Nkd13-2 | GGAUCUUAUUUCU (45) | UCGGAGdTdT (59) | 13 | 74.3 |
| G1498: Nkd14-1 | GGAUCUUAUUUCUU (39) | CGGAGdTdT (53) | 14 | 29.0 |
| G1498: Nkd14-2 | GGAUCUUAUUUCUU (46) | CGGAGdTdT (60) | 14 | 60.2 |
| Qneg | — | — | — | 0 |
| Plasmid | — | — | — | 3.6 |

*Nucleotides that are bold and underlined are locked nucleic acids.

[0218] The dual fluorescence assay of Example 3 was used to measure knockdown activity. These data show that increasing the number of locked nucleic acid substitutions tends to increase activity of an mdRNA having a nick at any of a number of positions. The single locked nucleic acid per sense strand appears to be most active when the nick is at position 11 (see FIG. 9). But, multiple locked nucleic acids on each sense strand make mdRNA having a nick at any position as active as the most optimal nick position with a single substitution (i.e., position 11) (FIG. 9). Thus, mdRNA having duplex stabilizing modifications make mdRNA essentially equally active regardless of the nick position.

[0219] Similar results were observed when locked nucleic acid substitutions were made in the LacZ dicer substrate mdRNA of Example 2 (SEQ ID NOS:3 and 4). The lacZ dicer was nicked at positions 8 to 14, and a duplicate set of nicked LacZ dicer molecules were made with the exception that the A at position 3 (from the 5′-end) of the 5′ sense strand was substituted for a locked nucleic acid A (LNA-A). As is evident from FIG. 10, most of the nicked lacZ dicer molecules containing LNA-A were as potent in knockdown activity as the unsubstituted lacZ dicer.

### Example 7

### mdRNA Knockdown of Influenza Virus Titer

[0220] The activity of a dicer substrate nicked dsRNA in reducing influenza virus titer as compared to a wild-type dsRNA (i.e., not having a nick) was examined The influenza dicer substrate sequence (25/27) is as follows:

| | |
|---|---|
| Sense | |
| 5′-GGAUCUUAUUUCUUCGGAGACAAdTdG | (SEQ ID NO: 62) |
| Antisense | |
| 5′-CAUUGUCUCCGAAGAAAUAAGAUCCUU | (SEQ ID NO: 11) |

The mdRNA sequences have a nicked sense strand after position 12, 13, and 14, respectively, as counted from the 5′-end, and the G at position 2 is substituted with locked nucleic acid G.

[0221] For the viral infectivity assay, Vero cells were seeded at 6.5×10⁴ cells/well the day before transfection in 500 μl 10% FBS/DMEM media per well. Samples of 100, 10, 1, 0.1, and 0.01 nM stock of each dsRNA were complexed with 1.0 μl (1 mg/ml stock) of Lipofectamine™ 2000 (Invitrogen, Carlsbad, Calif.) and incubated for 20 minutes at room temperature in 150 μl OPTIMEM (total volume) (Gibco, Carlsbad, Calif.). Vero cells were washed with OPTIMEM, and 150 μl of the transfection complex in OPTIMEM was then added to each well containing 150 μl of OPTIMEM media. Triplicate wells were tested for each condition. An additional control well with no transfection condition was prepared. Three hours post transfection, the media was removed. Each well was washed once with 200 μl PBS containing 0.3% BSA and 10 mM HEPES/PS. Cells in each well were infected with WSN strain of influenza virus at an MOI 0.01 in 200 μl of infection media containing 0.3% BSA/10 mM HEPES/PS and 4 μg/ml trypsin. The plate was incubated for 1 hour at 37° C. Unadsorbed virus was washed off with the 200 μl of infection media and discarded, then 400 μl DMEM containing 0.3% BSA/10 mM HEPES/PS and 4 μg/ml trypsin was added to each well. The plate was incubated at 37° C., 5% CO₂ for 48 hours, then 50 μl supernatant from each well was tested in duplicate by TCID₅₀ assays (50% Tissue-Culture Infective Dose, WHO protocol) in MDCK cells and titers were estimated using the Spearman and Karber formula. The results show that these mdRNAs show about a 50% to 60% viral titer knockdown, even at a concentration as low as 10 pM (FIG. 11).

[0222] An in vivo influenza mouse model was also used to examine the activity of a dicer substrate nicked dsRNA in reducing influenza virus titer as compared to a wild-type dsRNA (i.e., not having a nick). Female BALB/c mice (age 8-10 weeks with 5-10 mice per group) were dosed intranasally with 120 nmol/kg/day dsRNA (formulated in C12-norArg(NH₃+Cl⁻)—C12/DSPE-PEG2000/DSPC/cholesterol at a ratio of 30:1:20:49) for three consecutive days before intranasal challenge with influenza strain PR8 (20 PFU/mouse). Two days after infection, whole lungs are harvested from each mouse and placed in a solution of PBS/0.3% BSA with antibiotics, homogenize, and measure the viral titer (TCID₅₀). Doses were well tolerated by the mice, indicated by less than 2% body weight reduction in any of the dose groups. The mdRNAs tested exhibit similar, if not slightly greater, virus reduction in vivo as compared to unmodified and unnicked G1498 dicer substrate (see FIG. 12). Hence, mdRNA are active in vivo.

### Example 8

### Effect of mdRNA on Cytokine Induction

[0223] The effect of the mdRNA structure on cytokine induction in vivo was examined. Female BALB/c mice (age 7-9 weeks) were dosed intranasally with about 50 μM dsRNA (formulated in C12-norArg(NH₃+Cl−)-C12/DSPE-PEG2000/DSPC/cholesterol at a ratio of 30:1:20:49) or with 605 nmol/kg/day naked dsRNA for three consecutive days. About four hours after the final dose is administered, the mice were sacrificed to collect bronchoalveolar fluid (BALF), and collected blood is processed to serum for evaluation of the cytokine response. Bronchial lavage was performed with 0.5 mL ice-cold 0.3% BSA in saline two times for a total of 1 mL. BALF was spun and supernatants collected and frozen until cytokine analysis. Blood was collected from the vena cava immediately following euthanasia, placed into serum separator tubes, and allowed to clot at room temperature for at least 20 minutes. The samples were processed to serum, aliquoted into Millipore ULTRAFREE 0.22 μm filter tubes, spun at 12,000 rpm, frozen on dry ice, and then stored at −70° C. until analysis. Cytokine analysis of BALF and plasma were performed using the Procarta™ mouse 10-Plex Cytokine Assay Kit (Panomics, Fremont, Calif.) on a Bio-Plex™ array reader. Toxicity parameters were also measured, including body weights, prior to the first dose on day 0 and again on day 3 (just prior to euthanasia). Spleens were harvested and weighed (normalized to final body weight). The results are provided in Table 5.

TABLE 5
In vivo Cytokine Induction by Naked mdRNA

| | | | G1498:Nkd | | G1498:DSNkd | G1498:DSNkd | G1498:DSNkd |
|---|---|---|---|---|---|---|---|
| Cytokine | | G1498 | 11-1 | G1498:DS | 12-1 | 13-1 | 14-1 |
| IL-6 | Conc | 90.68 | 10.07 | 77.35 | 17.17 | 18.21 | 38.59 |
| | (pg/mL) | | | | | | |
| | Fold decrease | — | 9 | — | 5 | 4 | 2 |
| IL-12 | Conc | 661.48 | 20.32 | 1403.61 | 25.07 | 37.70 | 57.02 |
| (p40) | (pg/mL) | | | | | | |
| | Fold decrease | — | 33 | — | 56 | 37 | 25 |
| TNFα | Conc | 264.49 | 25.59 | 112.95 | 20.52 | 29.00 | 64.93 |
| | (pg/mL) | | | | | | |
| | Fold decrease | — | 10 | — | 6 | 4 | 2 |

[0224] The mdRNA (RISC or dicer sized) induced cytokines to lesser extent than the intact (i.e., not nicked) parent molecules. The decrease in cytokine induction was greatest when looking at IL-12 (p40), the cytokine with consistently the highest levels of induction of the 10 cytokine multiplex assay. For the mdRNA, the decrease in IL-12 (p40) ranges from 25- to 56-fold, while the reduction in either IL-6 or TNFα induction was more modest (the decrease in these two cytokines ranges from 2- to 10-fold). Thus, the mdRNA structure appears to provide an advantage in vivo in that cytokine induction is minimized compared to unmodified dsRNA.

[0225] Similar results were obtained with the formulated mdRNA, although the reduction in induction was not as prominent. In addition, the presence or absence of a locked nucleic acid has no effect on cytokine induction. These results are shown in Table 6.

TABLE 6
In vivo Cytokine Induction by Formulated mdRNA

| | | | G1498:Nkd | G1498:Nkd | G1498:DSNkd | G1498:DSNkd |
|---|---|---|---|---|---|---|
| Cytokine | | G1498:DS | 12-1 | 13-1 | 14-1 | 13 |
| IL-6 | Conc (pg/mL) | 29.04 | 52.95 | 10.28 | 7.79 | 44.29 |
| | Fold decrease | — | −1.8 | 3 | 4 | −1.5 |
| IL-12 (p40) | Conc (pg/mL) | 298.93 | 604.24 | 136.45 | 126.71 | 551.49 |
| | Fold decrease | — | 0 | 2 | 2 | 1 |
| TNFα | Conc (pg/mL) | 13.49 | 21.35 | 3.15 | 3.15 | 18.69 |
| | Fold decrease | — | −1.6 | 4 | 4 | 1.4 |

[0226] The teachings of all of references cited herein including patents, patent applications, journal articles, wedpages, tables, and priority documents are incorporated herein in their entirety by reference. Although the foregoing disclosure has been described in detail by way of example for purposes of clarity of understanding, it will be apparent to the artisan that certain changes and modifications may be practiced within the scope of the appended claims which are presented by way of illustration not limitation. In this context, various publications and other references have been cited within the foregoing disclosure for economy of description. It is noted, however, that the various publications discussed herein are incorporated solely for their disclosure prior to the filing date of the present application, and the inventors reserve the right to antedate such disclosure by virtue of prior invention.

The application's sequence listing, which the Patent Office published only in electronic form, follows.

SEQUENCE LISTING (3164 sequences)

SEQ ID NO: 1 - DNA, 21 bp, Artificial Sequence
  Description of Combined DNA/RNA Molecule: Synthetic oligonucleotide
  Description of Artificial Sequence: Synthetic oligonucleotide
cuacacaaaucagcgauuutt

SEQ ID NO: 2 - DNA, 21 bp, Artificial Sequence
  Description of Combined DNA/RNA Molecule: Synthetic oligonucleotide
  Description of Artificial Sequence: Synthetic oligonucleotide
aaaucgcugauuuguguagtt

SEQ ID NO: 3 - DNA, 25 bp, Artificial Sequence
  Description of Combined DNA/RNA Molecule: Synthetic oligonucleotide
  Description of Artificial Sequence: Synthetic oligonucleotide
cuacacaaaucagcgauuuccaugt

SEQ ID NO: 4 - RNA, 27 nt, Artificial Sequence
  Description of Artificial Sequence: Synthetic oligonucleotide
acauggaaaucgcugauuuguguaguc

SEQ ID NO: 5 - RNA, 13 nt, Artificial Sequence
  Description of Artificial Sequence: Synthetic oligonucleotide
cuacacaaaucag

SEQ ID NO: 6 - DNA, 11 bp, Artificial Sequence
  Description of Combined DNA/RNA Molecule: Synthetic oligonucleotide
  Description of Artificial Sequence: Synthetic oligonucleotide
gauuuccaugt

SEQ ID NO: 7 - DNA, 21 bp, Artificial Sequence
  Description of Combined DNA/RNA Molecule: Synthetic oligonucleotide
  Description of Artificial Sequence: Synthetic oligonucleotide
ggaucuuauuucuucggagtt

SEQ ID NO: 8 - DNA, 21 bp, Artificial Sequence
  Description of Combined DNA/RNA Molecule: Synthetic oligonucleotide
  Description of Artificial Sequence: Synthetic oligonucleotide
cuccgaagaaauaagaucctt

SEQ ID NO: 9 - RNA, 11 nt, Artificial Sequence
  Description of Artificial Sequence: Synthetic oligonucleotide
ggaucuuauuu

SEQ ID NO: 10 - DNA, 10 bp, Artificial Sequence
  Description of Combined DNA/RNA Molecule: Synthetic oligonucleotide
  Description of Artificial Sequence: Synthetic oligonucleotide
cuucggagtt

SEQ ID NO: 11 - RNA, 27 nt, Artificial Sequence
  Description of Artificial Sequence: Synthetic oligonucleotide
cauugucuccgaagaaauaagauccuu

SEQ ID NO: 12 - RNA, 8 nt, Artificial Sequence
  Description of Artificial Sequence: Synthetic oligonucleotide
  modified_base (2): LNA-G
ggaucuua

SEQ ID NO: 13 - DNA, 17 bp, Artificial Sequence
  Description of Combined DNA/RNA Molecule: Synthetic oligonucleotide
  Description of Artificial Sequence: Synthetic oligonucleotide
uuucuucggagacaatg

SEQ ID NO: 14 - DNA, 16 bp, Artificial Sequence
  Description of Combined DNA/RNA Molecule: Synthetic oligonucleotide
  Description of Artificial Sequence: Synthetic oligonucleotide
uucuucggagacaatg

SEQ ID NO: 15 - DNA, 15 bp, Artificial Sequence
  Description of Combined DNA/RNA Molecule: Synthetic oligonucleotide
  Description of Artificial Sequence: Synthetic oligonucleotide
ucuucggagacaatg

SEQ ID NO: 16 - DNA, 14 bp, Artificial Sequence
  Description of Combined DNA/RNA Molecule: Synthetic oligonucleotide
  Description of Artificial Sequence: Synthetic oligonucleotide
cuucggagacaatg

SEQ ID NO: 17 - DNA, 13 bp, Artificial Sequence
  Description of Combined DNA/RNA Molecule: Synthetic oligonucleotide
  Description of Artificial Sequence: Synthetic oligonucleotide
uucggagacaatg

SEQ ID NO: 18 - DNA, 12 bp, Artificial Sequence
  Description of Combined DNA/RNA Molecule: Synthetic oligonucleotide
  Description of Artificial Sequence: Synthetic oligonucleotide
ucggagacaatg

SEQ ID NO: 19 - DNA, 11 bp, Artificial Sequence
  Description of Combined DNA/RNA Molecule: Synthetic oligonucleotide
  Description of Artificial Sequence: Synthetic oligonucleotide
cggagacaatg

SEQ ID NO: 20 - RNA, 9 nt, Artificial Sequence
  Description of Artificial Sequence: Synthetic oligonucleotide
  modified_base (2): LNA-G
ggaucuuau

SEQ ID NO: 21 - RNA, 10 nt, Artificial Sequence
  Description of Artificial Sequence: Synthetic oligonucleotide
  modified_base (2): LNA-G
ggaucuuauu

SEQ ID NO: 22 - RNA, 11 nt, Artificial Sequence
  Description of Artificial Sequence: Synthetic oligonucleotide
  modified_base (2): LNA-G
ggaucuuauuu

SEQ ID NO: 23 - RNA, 12 nt, Artificial Sequence
  Description of Artificial Sequence: Synthetic oligonucleotide
  modified_base (2): LNA-G
ggaucuuauuuc

SEQ ID NO: 24 - RNA, 8 nt, Artificial Sequence
  Description of Artificial Sequence: Synthetic oligonucleotide
  modified_base (3): LNA-A
cuacacaa

SEQ ID NO: 25 - DNA, 13 bp, Artificial Sequence
  Description of Artificial Sequence: Synthetic oligonucleotide
  modified_base (8): LNA-A
aucagcgauuutt

SEQ ID NO: 26 - DNA, 12 bp, Artificial Sequence
  Description of Artificial Sequence: Synthetic oligonucleotide
  modified_base (7): LNA-A
ucagcgauuutt

SEQ ID NO: 27 - DNA, 11 bp, Artificial Sequence
  Description of Artificial Sequence: Synthetic oligonucleotide
  modified_base (6): LNA-A
cagcgauuutt

SEQ ID NO: 28 - DNA, 10 bp, Artificial Sequence
  Description of Artificial Sequence: Synthetic oligonucleotide
  modified_base (5): LNA-A
agcgauuutt

SEQ ID NO: 29 - DNA, 9 bp, Artificial Sequence
  Description of Artificial Sequence: Synthetic oligonucleotide
  modified_base (4): LNA-A
gcgauuutt

SEQ ID NO: 30 - DNA, 8 bp, Artificial Sequence
  Description of Artificial Sequence: Synthetic oligonucleotide
  modified_base (3): LNA-A
cgauuutt

SEQ ID NO: 31 - DNA, 7 bp, Artificial Sequence
  Description of Artificial Sequence: Synthetic oligonucleotide
  modified_base (2): LNA-A
gauuutt

SEQ ID NO: 32 - RNA, 9 nt, Artificial Sequence
  Description of Artificial Sequence: Synthetic oligonucleotide
  modified_base (3): LNA-A
cuacacaaa

SEQ ID NO: 33 - RNA, 10 nt, Artificial Sequence
  Description of Artificial Sequence: Synthetic oligonucleotide
  modified_base (3): LNA-A
cuacacaaau

SEQ ID NO: 34 - RNA, 11 nt, Artificial Sequence
  Description of Artificial Sequence: Synthetic oligonucleotide
  modified_base (3): LNA-A
cuacacaaauc

SEQ ID NO: 35 - RNA, 12 nt, Artificial Sequence
  Description of Artificial Sequence: Synthetic oligonucleotide
  modified_base (3): LNA-A
cuacacaaauca

SEQ ID NO: 36 - RNA, 13 nt, Artificial Sequence
  Description of Artificial Sequence: Synthetic oligonucleotide
  modified_base (3): LNA-A
cuacacaaaucag

SEQ ID NO: 37 - RNA, 14 nt, Artificial Sequence
  Description of Artificial Sequence: Synthetic oligonucleotide
  modified_base (3): LNA-A
cuacacaaaucagc

SEQ ID NO: 38 - RNA, 13 nt, Artificial Sequence
  Description of Artificial Sequence: Synthetic oligonucleotide
  modified_base (2): LNA-G
ggaucuuauuucu

SEQ ID NO: 39 - RNA, 14 nt, Artificial Sequence
  Description of Artificial Sequence: Synthetic oligonucleotide
  modified_base (2): LNA-G
ggaucuuauuucuu

SEQ ID NO: 40 - RNA, 8 nt, Artificial Sequence
  Description of Artificial Sequence: Synthetic oligonucleotide
  modified_base (2): LNA-G
  modified_base (8): LNA-A
ggaucuua

SEQ ID NO: 41 - RNA, 9 nt, Artificial Sequence
  Description of Artificial Sequence: Synthetic oligonucleotide
  modified_base (2): LNA-G
  modified_base (9): LNA-U
ggaucuuau

SEQ ID NO: 42 - RNA, 10 nt, Artificial Sequence
  Description of Artificial Sequence: Synthetic oligonucleotide
  modified_base (2): LNA-G
  modified_base (10): LNA-U
ggaucuuauu

SEQ ID NO: 43 - RNA, 11 nt, Artificial Sequence
  Description of Artificial Sequence: Synthetic oligonucleotide
  modified_base (2): LNA-G
  modified_base (11): LNA-U
ggaucuuauuu

SEQ ID NO: 44 - RNA, 12 nt, Artificial Sequence
  Description of Artificial Sequence: Synthetic oligonucleotide
  modified_base (2): LNA-G
  modified_base (12): LNA-C
ggaucuuauuuc

SEQ ID NO: 45 - RNA, 13 nt, Artificial Sequence
  Description of Artificial Sequence: Synthetic oligonucleotide
  modified_base (2): LNA-G
  modified_base (13): LNA-U
ggaucuuauuucu

SEQ ID NO: 46 - RNA, 14 nt, Artificial Sequence
  Description of Artificial Sequence: Synthetic oligonucleotide
  modified_base (2): LNA-G
  modified_base (14): LNA-U
ggaucuuauuucuu

SEQ ID NO: 47 - DNA, 13 bp, Artificial Sequence
  Description of Combined DNA/RNA Molecule: Synthetic oligonucleotide
  Description of Artificial Sequence: Synthetic oligonucleotide
  modified_base (8): LNA-G
uuucuucggagtt

SEQ ID NO: 48 - DNA, 12 bp, Artificial Sequence
  Description of Combined DNA/RNA Molecule: Synthetic oligonucleotide
  Description of Artificial Sequence: Synthetic oligonucleotide
  modified_base (7): LNA-G
uucuucggagtt

SEQ ID NO: 49 - DNA, 11 bp, Artificial Sequence
  Description of Combined DNA/RNA Molecule: Synthetic oligonucleotide
  Description of Artificial Sequence: Synthetic oligonucleotide
  modified_base (6): LNA-G
ucuucggagtt

SEQ ID NO: 50 - DNA, 10 bp, Artificial Sequence
  Description of Combined DNA/RNA Molecule: Synthetic oligonucleotide
  Description of Artificial Sequence: Synthetic oligonucleotide
  modified_base (5): LNA-G
cuucggagtt

SEQ ID NO: 51 - DNA, 9 bp, Artificial Sequence
  Description of Combined DNA/RNA Molecule: Synthetic oligonucleotide
  Description of Artificial Sequence: Synthetic oligonucleotide
  modified_base (4): LNA-G
uucggagtt

SEQ ID NO: 52 - DNA, 8 bp, Artificial Sequence
  Description of Combined DNA/RNA Molecule: Synthetic oligonucleotide
  Description of Artificial Sequence: Synthetic oligonucleotide
  modified_base (3): LNA-G
ucggagtt

SEQ ID NO: 53 - DNA, 7 bp, Artificial Sequence
  Description of Combined DNA/RNA Molecule: Synthetic oligonucleotide
  Description of Artificial Sequence: Synthetic oligonucleotide
  modified_base (2): LNA-G
cggagtt

SEQ ID NO: 54 - DNA, 13 bp, Artificial Sequence
  Description of Combined DNA/RNA Molecule: Synthetic oligonucleotide
  Description of Artificial Sequence: Synthetic oligonucleotide
  modified_base (1): LNA-U
  modified_base (8): LNA-G
uuucuucggagtt

SEQ ID NO: 55 - DNA, 12 bp, Artificial Sequence
  Description of Combined DNA/RNA Molecule: Synthetic oligonucleotide
  Description of Artificial Sequence: Synthetic oligonucleotide
  modified_base (1): LNA-U
  modified_base (7): LNA-G
uucuucggagtt

SEQ ID NO: 56 - DNA, 11 bp, Artificial Sequence
  Description of Combined DNA/RNA Molecule: Synthetic oligonucleotide
  Description of Artificial Sequence: Synthetic oligonucleotide
  modified_base (1): LNA-U
  modified_base (6): LNA-G
ucuucggagtt

SEQ ID NO: 57 - DNA, 10 bp, Artificial Sequence
  Description of Combined DNA/RNA Molecule: Synthetic oligonucleotide
  Description of Artificial Sequence: Synthetic oligonucleotide
  modified_base (1): LNA-C
  modified_base (5): LNA-G
cuucggagtt

SEQ ID NO: 58 - DNA, 9 bp, Artificial Sequence
  Description of Combined DNA/RNA Molecule: Synthetic oligonucleotide
  Description of Artificial Sequence: Synthetic oligonucleotide
  modified_base (1): LNA-U
  modified_base (4): LNA-G
uucggagtt

SEQ ID NO: 59 - DNA, 8 bp, Artificial Sequence
  Description of Combined DNA/RNA Molecule: Synthetic oligonucleotide
  Description of Artificial Sequence: Synthetic oligonucleotide
  modified_base (1): LNA-U
  modified_base (3): LNA-G
ucggagtt

SEQ ID NO: 60 - DNA, 7 bp, Artificial Sequence
  Description of Combined DNA/RNA Molecule: Synthetic oligonucleotide
  Description of Artificial Sequence: Synthetic oligonucleotide
  modified_base (1): LNA-C
  modified_base (2): LNA-G
cggagtt

SEQ ID NO: 61 - DNA, 21 bp, Artificial Sequence
  Description of Combined DNA/RNA Molecule: Synthetic oligonucleotide
  Description of Artificial Sequence: Synthetic oligonucleotide
  modified_base (2): LNA-G
  modified_base (16): LNA-G
ggaucuuauuucuucggagtt

SEQ ID NO: 62 - DNA, 25 bp, Artificial Sequence
  Description of Combined DNA/RNA Molecule: Synthetic oligonucleotide
  Description of Artificial Sequence: Synthetic oligonucleotide
ggaucuuauuucuucggagacaatg

SEQ ID NO: 63 - RNA, 25 nt, Artificial Sequence
  Description of Artificial Sequence: Synthetic oligonucleotide
guauuuugaugaggaguucacggcc

SEQ ID NO: 64 - RNA, 25 nt, Artificial Sequence
  Description of Artificial Sequence: Synthetic oligonucleotide
ggcccagaugaucaccaucacacca

SEQ ID NO: 65 - RNA, 25 nt, Artificial Sequence
  Description of Artificial Sequence: Synthetic oligonucleotide
gggaagaaaacuauccugcggguuu

SEQ ID NO: 66 - RNA, 25 nt, Artificial Sequence
  Description of Artificial Sequence: Synthetic oligonucleotide
guuuuaauuuauuucauccaguuug

SEQ ID NO: 67 - RNA, 25 nt, Artificial Sequence
  Description of Artificial Sequence: Synthetic oligonucleotide
acguagggaaauguuaaggacuucu

SEQ ID NO: 68 - RNA, 25 nt, Artificial Sequence
  Description of Artificial Sequence: Synthetic oligonucleotide
ccaggguuuacccagugggacagag

SEQ ID NO: 69 - RNA, 25 nt, Artificial Sequence
  Description of Artificial Sequence: Synthetic oligonucleotide
agcaagguuuaaauuuguuauugug

SEQ ID NO: 70 - RNA, 25 nt, Artificial Sequence
  Description of Artificial Sequence: Synthetic oligonucleotide
uguauuauguuguucaaaugcauuu

SEQ ID NO: 71 - RNA, 25 nt, Artificial Sequence
  Description of Artificial Sequence: Synthetic oligonucleotide
uuuuaaucuuugugacaggaaagcc

SEQ ID NO: 72 - RNA, 25 nt, Artificial Sequence
  Description of Artificial Sequence: Synthetic oligonucleotide
uuaaucuuugugacaggaaagcccu

SEQ ID NO: 73 - RNA, 25 nt, Artificial Sequence
  Description of Artificial Sequence: Synthetic oligonucleotide
gcugcuuaugucucccagcauggcc

SEQ ID NO: 74 - RNA, 25 nt, Artificial Sequence
  Description of Artificial Sequence: Synthetic oligonucleotide
aaguguuucagaagcuucucccuga

SEQ ID NO: 75 - RNA, 25 nt, Artificial Sequence
  Description of Artificial Sequence: Synthetic oligonucleotide
gaccaucaauaaggaagaagcccuu

SEQ ID NO: 76 - RNA, 25 nt, Artificial Sequence
  Description of Artificial Sequence: Synthetic oligonucleotide
ccaucaauaaggaagaagcccuuca

SEQ ID NO: 77 - RNA, 25 nt, Artificial Sequence
  Description of Artificial Sequence: Synthetic oligonucleotide
ucaauaaggaagaagcccuucagcg

SEQ ID NO: 78 - RNA, 25 nt, Artificial Sequence
  Description of Artificial Sequence: Synthetic oligonucleotide
aauaaggaagaagcccuucagcggc

SEQ ID NO: 79 - RNA, 25 nt, Artificial Sequence
  Description of Artificial Sequence: Synthetic oligonucleotide
aggaagaagcccuucagcggccagu

SEQ ID NO: 80 - RNA, 25 nt, Artificial Sequence
  Description of Artificial Sequence: Synthetic oligonucleotide
gcauaacuaaaggugaaaagcuccg

SEQ ID NO: 81 - RNA, 25 nt, Artificial Sequence
  Description of Artificial Sequence: Synthetic oligonucleotide
cauaacuaaaggugaaaagcuccgg

SEQ ID NO: 82 - RNA, 25 nt, Artificial Sequence
  Description of Artificial Sequence: Synthetic oligonucleotide
cuacaucacgccagucaacagucug

SEQ ID NO: 83 - RNA, 25 nt, Artificial Sequence
  Description of Artificial Sequence: Synthetic oligonucleotide
acuggauuuaagcagaguucaaaag

SEQ ID NO: 84 - RNA, 25 nt, Artificial Sequence
  Description of Artificial Sequence: Synthetic oligonucleotide
cuggauuuaagcagaguucaaaagc

SEQ ID NO: 85 - RNA, 25 nt, Artificial Sequence
  Description of Artificial Sequence: Synthetic oligonucleotide
gauuuaagcagaguucaaaagcccu

SEQ ID NO: 86 - RNA, 25 nt, Artificial Sequence
  Description of Artificial Sequence: Synthetic oligonucleotide
auuuaagcagaguucaaaagcccuu

SEQ ID NO: 87 - RNA, 25 nt, Artificial Sequence
  Description of Artificial Sequence: Synthetic oligonucleotide
uuaagcagaguucaaaagcccuuca

SEQ ID NO: 88 - RNA, 25 nt, Artificial Sequence
  Description of Artificial Sequence: Synthetic oligonucleotide
uaagcagaguucaaaagcccuucag

SEQ ID NO: 89 - RNA, 25 nt, Artificial Sequence
  Description of Artificial Sequence: Synthetic oligonucleotide
agcagaguucaaaagcccuucagcg

SEQ ID NO: 90 - RNA, 25 nt, Artificial Sequence
  Description of Artificial Sequence: Synthetic oligonucleotide
cucagggucugagugaagccgcucg

SEQ ID NO: 91 - RNA, 25 nt, Artificial Sequence
  Description of Artificial Sequence: Synthetic oligonucleotide
caagcaacuacaucacgccagucaa

SEQ ID NO: 92 - RNA, 25 nt, Artificial Sequence
  Description of Artificial Sequence: Synthetic oligonucleotide
aucaauggcagcuucuuggugcgug

SEQ ID NO: 93 - RNA, 25 nt, Artificial Sequence
  Description of Artificial Sequence: Synthetic oligonucleotide
uuccagcccacauuggauucaucag

SEQ ID NO: 94 - RNA, 25 nt, Artificial Sequence
  Description of Artificial Sequence: Synthetic oligonucleotide
cagcugagaauguggaauaccuaag

SEQ ID NO: 95 - RNA, 25 nt, Artificial Sequence
  Description of Artificial Sequence: Synthetic oligonucleotide
aacguaucuccuaauuugaggcuca

SEQ ID NO: 96 - RNA, 25 nt, Artificial Sequence
  Description of Artificial Sequence: Synthetic oligonucleotide
ccuaaaauaauuucucuacaauugg

SEQ ID NO: 97 - RNA, 25 nt, Artificial Sequence
  Description of Artificial Sequence: Synthetic oligonucleotide
uggaagauucagcuaguuaggagcc

SEQ ID NO: 98 - RNA, 25 nt, Artificial Sequence
  Description of Artificial Sequence: Synthetic oligonucleotide
uuaaacucuccuagucaauauccac

SEQ ID NO: 99 - RNA, 25 nt, Artificial Sequence
  Description of Artificial Sequence: Synthetic oligonucleotide
cagccuacaguuauguucagucaca

SEQ ID NO: 100 - RNA, 25 nt, Artificial Sequence
  Description of Artificial Sequence: Synthetic oligonucleotide
guuauguucagucacacacacauac

SEQ ID NO: 101 - RNA, 25 nt, Artificial Sequence
  Description of Artificial Sequence: Synthetic oligonucleotide
cacauacaaaauguuccuuuugcuu

SEQ ID NO: 102 - RNA, 25 nt, Artificial Sequence
  Description of Artificial Sequence: Synthetic oligonucleotide
uccuuuugcuuuuaaaguaauuuuu

SEQ ID NO: 103 - RNA, 25 nt, Artificial Sequence
  Description of Artificial Sequence: Synthetic oligonucleotide
ugaccugugaagcaacagucaaugg

SEQ ID NO: 104 - RNA, 25 nt, Artificial Sequence
  Description of Artificial Sequence: Synthetic oligonucleotide
cuaucucacacaucgacaaaccaau

SEQ ID NO: 105 - RNA, 25 nt, Artificial Sequence
  Description of Artificial Sequence: Synthetic oligonucleotide
uguccucaauuguacugcuaccacu

SEQ ID NO: 106 - RNA, 25 nt, Artificial Sequence
  Description of Artificial Sequence: Synthetic oligonucleotide
aaaccguagcuggcaagcggucuua

SEQ ID NO: 107 - RNA, 25 nt, Artificial Sequence
  Description of Artificial Sequence: Synthetic oligonucleotide
uagcuggcaagcggucuuaccggcu

SEQ ID NO: 108 - RNA, 25 nt, Artificial Sequence
  Description of Artificial Sequence: Synthetic oligonucleotide
uuguaugguuaaaagauggguuacc

SEQ ID NO: 109 - RNA, 25 nt, Artificial Sequence
  Description of Artificial Sequence: Synthetic oligonucleotide
ugguuaaaagauggguuaccugcga

SEQ ID NO: 110 - RNA, 25 nt, Artificial Sequence
  Description of Artificial Sequence: Synthetic oligonucleotide
cagggaauuauacaaucuugcugag

SEQ ID NO: 111 - RNA, 25 nt, Artificial Sequence
  Description of Artificial Sequence: Synthetic oligonucleotide
acaaucuugcugagcauaaaacagu

SEQ ID NO: 112 - RNA, 25 nt, Artificial Sequence
  Description of Artificial Sequence: Synthetic oligonucleotide
ccaauaaugaagaguccuuuauccu

SEQ ID NO: 113 - RNA, 25 nt, Artificial Sequence
  Description of Artificial Sequence: Synthetic oligonucleotide
acuuuggauguuccaacgcaaguug

SEQ ID NO: 114 - RNA, 25 nt, Artificial Sequence
  Description of Artificial Sequence: Synthetic oligonucleotide
aaugcuuccacuaaacugaaaccau

SEQ ID NO: 115 - RNA, 25 nt, Artificial Sequence
  Description of Artificial Sequence: Synthetic oligonucleotide
gagaaaguuugacuuuguuaaauau

SEQ ID NO: 116 - RNA, 25 nt, Artificial Sequence
  Description of Artificial Sequence: Synthetic oligonucleotide
aaagaacuacuguauauuaaaaguu

SEQ ID NO: 117 - RNA, 25 nt, Artificial Sequence
  Description of Artificial Sequence: Synthetic oligonucleotide
uuagaaauacggguuuugacuuaac

SEQ ID NO: 118 - RNA, 25 nt, Artificial Sequence
  Description of Artificial Sequence: Synthetic oligonucleotide
aacauggguacagcaaacucagcac

SEQ ID NO: 119 - RNA, 25 nt, Artificial Sequence
  Description of Artificial Sequence: Synthetic oligonucleotide
aaagacacagaagaugcugaccuca

SEQ ID NO: 120 - RNA, 25 nt, Artificial Sequence
  Description of Artificial Sequence: Synthetic oligonucleotide
uaguagggagguuuauucagaucgc

SEQ ID NO: 121 - RNA, 25 nt, Artificial Sequence
  Description of Artificial Sequence: Synthetic oligonucleotide
gccuucugcagcaggguucugggau

SEQ ID NO: 122 - RNA, 25 nt, Artificial Sequence
  Description of Artificial Sequence: Synthetic oligonucleotide
ggucugguacauauuggaaauuaug

SEQ ID NO: 123 - RNA, 25 nt, Artificial Sequence
  Description of Artificial Sequence: Synthetic oligonucleotide
cuaguccuuccgauggaagcacuag

SEQ ID NO: 124 - RNA, 25 nt, Artificial Sequence
  Description of Artificial Sequence: Synthetic oligonucleotide
ccagugaauauuguuuuuaugugga

SEQ ID NO: 125 - RNA, 25 nt, Artificial Sequence
  Description of Artificial Sequence: Synthetic oligonucleotide
augaauucaaguuggaauugguaga

SEQ ID NO: 126 - RNA, 25 nt, Artificial Sequence
  Description of Artificial Sequence: Synthetic oligonucleotide
caggacacagauuuagacuuggaga

SEQ ID NO: 127 - RNA, 25 nt, Artificial Sequence
  Description of Artificial Sequence: Synthetic oligonucleotide
cucaaagcacaguuacaguauucca

SEQ ID NO: 128 - RNA, 25 nt, Artificial Sequence
  Description of Artificial Sequence: Synthetic oligonucleotide
accacugccaccacugaugaauuaa

SEQ ID NO: 129 - RNA, 25 nt, Artificial Sequence
  Description of Artificial Sequence: Synthetic oligonucleotide
gaaacuacuagugccacaucaucac

SEQ ID NO: 130 - RNA, 25 nt, Artificial Sequence
  Description of Artificial Sequence: Synthetic oligonucleotide
aagucggacagccucaccaaacaga

SEQ ID NO: 131 - RNA, 25 nt, Artificial Sequence
  Description of Artificial Sequence: Synthetic oligonucleotide
gaaagcgaaaaauggaacaugaugg

SEQ ID NO: 132 - RNA, 25 nt, Artificial Sequence
  Description of Artificial Sequence: Synthetic oligonucleotide
cccucugauuuagcauguagacugc

SEQ ID NO: 133 - RNA, 25 nt, Artificial Sequence
  Description of Artificial Sequence: Synthetic oligonucleotide
ugagcuauuuaaggaucuauuuaug

SEQ ID NO: 134 - RNA, 25 nt, Artificial Sequence
  Description of Artificial Sequence: Synthetic oligonucleotide
aaaaggugaaaaagcacuauuauca

SEQ ID NO: 135 - RNA, 25 nt, Artificial Sequence
  Description of Artificial Sequence: Synthetic oligonucleotide
gaaaaagcacuauuaucaguucugc

SEQ ID NO: 136 - RNA, 25 nt, Artificial Sequence
  Description of Artificial Sequence: Synthetic oligonucleotide
ggcugaaaagaaagauuaaaccuac

SEQ ID NO: 137 - RNA, 25 nt, Artificial Sequence
  Description of Artificial Sequence: Synthetic oligonucleotide
uaaacccuuauaauaaaauccuucu

SEQ ID NO: 138 - RNA, 25 nt, Artificial Sequence
  Description of Artificial Sequence: Synthetic oligonucleotide
cauacuauuagccaaugcuguagac

SEQ ID NO: 139 - RNA, 25 nt, Artificial Sequence
  Description of Artificial Sequence: Synthetic oligonucleotide
gacagaagcauuuugauaggaauag

SEQ ID NO: 140 - RNA, 25 nt, Artificial Sequence
  Description of Artificial Sequence: Synthetic oligonucleotide
agagcaaauaagauaauggcccuga

SEQ ID NO: 141 - RNA, 25 nt, Artificial Sequence
  Description of Artificial Sequence: Synthetic oligonucleotide
ccaacauuuuucucuuccucaagca

SEQ ID NO: 142 - RNA, 25 nt, Artificial Sequence
  Description of Artificial Sequence: Synthetic oligonucleotide
uuaaguaugagaaaaguucagccca

SEQ ID NO: 143 - RNA, 25 nt, Artificial Sequence
  Description of Artificial Sequence: Synthetic oligonucleotide
caggaauaaagauggcugcugaacc

SEQ ID NO: 144 - RNA, 25 nt, Artificial Sequence
  Description of Artificial Sequence: Synthetic oligonucleotide
aauuugaaugaccaaguucucuuca

SEQ ID NO: 145 - RNA, 25 nt, Artificial Sequence
  Description of Artificial Sequence: Synthetic oligonucleotide
auguauaaagauagccagccuagag

SEQ ID NO: 146 - RNA, 25 nt, Artificial Sequence
  Description of Artificial Sequence: Synthetic oligonucleotide
ggcuguaacuaucucugugaagugu

SEQ ID NO: 147 - RNA, 25 nt, Artificial Sequence
  Description of Artificial Sequence: Synthetic oligonucleotide
ucugugaagugugagaaaauuucaa

SEQ ID NO: 148 - RNA, 25 nt, Artificial Sequence
  Description of Artificial Sequence: Synthetic oligonucleotide
ccuuuaaggaaaugaauccuccuga

SEQ ID NO: 149 - RNA, 25 nt, Artificial Sequence
  Description of Artificial Sequence: Synthetic oligonucleotide
aaggauacaaaaagugacaucauau

SEQ ID NO: 150 - RNA, 25 nt, Artificial Sequence
  Description of Artificial Sequence: Synthetic oligonucleotide
agaugcaauuugaaucuucaucaua

SEQ ID NO: 151 - RNA, 25 nt, Artificial Sequence
  Description of Artificial Sequence: Synthetic oligonucleotide
guucaaaacgaagacuagcuauuaa

SEQ ID NO: 152 - RNA, 25 nt, Artificial Sequence
  Description of Artificial Sequence: Synthetic oligonucleotide
gugaaaccucaucucuacuaaaaau

SEQ ID NO: 153 - RNA, 25 nt, Artificial Sequence
  Description of Artificial Sequence: Synthetic oligonucleotide
acgaaagagaagcucuaucucgccu

SEQ ID NO: 154 - RNA, 25 nt, Artificial Sequence
  Description of Artificial Sequence: Synthetic oligonucleotide
cuccacaagcgccuucgguccaguu

SEQ ID NO: 155 - RNA, 25 nt, Artificial Sequence
  Description of Artificial Sequence: Synthetic oligonucleotide
gagaagauuccaaagauguagccgc

SEQ ID NO: 156 - RNA, 25 nt, Artificial Sequence
  Description of Artificial Sequence: Synthetic oligonucleotide
aaucuggauucaaugaggagacuug

SEQ ID NO: 157 - RNA, 25 nt, Artificial Sequence
  Description of Artificial Sequence: Synthetic oligonucleotide
agaacagauuugagaguagugagga

SEQ ID NO: 158 - RNA, 25 nt, Artificial Sequence
  Description of Artificial Sequence: Synthetic oligonucleotide
ccagagcugugcagaugaguacaaa

SEQ ID NO: 159 - RNA, 25 nt, Artificial Sequence
  Description of Artificial Sequence: Synthetic oligonucleotide
ccucagauuguuguuguuaaugggc

SEQ ID NO: 160 - RNA, 25 nt, Artificial Sequence
  Description of Artificial Sequence: Synthetic oligonucleotide
cuauuuuaauuauuuuuaauuuauu

SEQ ID NO: 161 - RNA, 25 nt, Artificial Sequence
  Description of Artificial Sequence: Synthetic oligonucleotide
uuuaauuuauuaauauuuaaauaug

SEQ ID NO: 162 - RNA, 25 nt, Artificial Sequence
  Description of Artificial Sequence: Synthetic oligonucleotide
augcaguuugaauauccuuuguuuc

SEQ ID NO: 163 - RNA, 25 nt, Artificial Sequence
  Description of Artificial Sequence: Synthetic oligonucleotide
caugcugcuggcgucuaaguguuug

SEQ ID NO: 164 - RNA, 25 nt, Artificial Sequence
  Description of Artificial Sequence: Synthetic oligonucleotide
agaugugcauuucaccugugacaaa

SEQ ID NO: 165 - RNA, 25 nt, Artificial Sequence
  Description of Artificial Sequence: Synthetic oligonucleotide
ucaaaaccugugccaggcugaauua

SEQ ID NO: 166 - RNA, 25 nt, Artificial Sequence
  Description of Artificial Sequence: Synthetic oligonucleotide
gaauguggguagucauucuuacaau

SEQ ID NO: 167 - RNA, 25 nt, Artificial Sequence
  Description of Artificial Sequence: Synthetic oligonucleotide
auguggguagucauucuuacaauug

SEQ ID NO: 168 - RNA, 25 nt, Artificial Sequence
  Description of Artificial Sequence: Synthetic oligonucleotide
ugaaaaugagcaucagagaguguac

SEQ ID NO: 169 - RNA, 25 nt, Artificial Sequence
  Description of Artificial Sequence: Synthetic oligonucleotide
uugcuuuucauguagaacucagcag

SEQ ID NO: 170 - RNA, 25 nt, Artificial Sequence
  Description of Artificial Sequence: Synthetic oligonucleotide
uguauuucuauauuuauuuucagua

SEQ ID NO: 171 - RNA, 25 nt, Artificial Sequence
  Description of Artificial Sequence: Synthetic oligonucleotide
uuugauuaauguuucuuaaauggaa

SEQ ID NO: 172 - RNA, 25 nt, Artificial Sequence
  Description of Artificial Sequence: Synthetic oligonucleotide
caacguguauagugccuaaaauugu

SEQ ID NO: 173 - RNA, 25 nt, Artificial Sequence
  Description of Artificial Sequence: Synthetic oligonucleotide
cauauccuuggcuacuaacaucugg

SEQ ID NO: 174 - RNA, 25 nt, Artificial Sequence
  Description of Artificial Sequence: Synthetic oligonucleotide
uacuaacaucuggagacugugagcu

SEQ ID NO: 175 - RNA, 25 nt, Artificial Sequence
  Description of Artificial Sequence: Synthetic oligonucleotide
cauaaguugugugcuuuuuauuaau

SEQ ID NO: 176 - RNA, 25 nt, Artificial Sequence
  Description of Artificial Sequence: Synthetic oligonucleotide
gcaucauuuuggcucuucuuacauu

SEQ ID NO: 177 - RNA, 25 nt, Artificial Sequence
  Description of Artificial Sequence: Synthetic oligonucleotide
gcucuucuuacauuuguaaaaaugu

SEQ ID NO: 178 - RNA, 25 nt, Artificial Sequence
  Description of Artificial Sequence: Synthetic oligonucleotide
agauuaggucaucuuaauucauauu

SEQ ID NO: 179 - RNA, 25 nt, Artificial Sequence
  Description of Artificial Sequence: Synthetic oligonucleotide
auggaauugaaagaacuaaucauga

SEQ ID NO: 180 - RNA, 25 nt, Artificial Sequence
  Description of Artificial Sequence: Synthetic oligonucleotide
cacacucauuccuucugcucuuggg

SEQ ID NO: 181 - RNA, 25 nt, Artificial Sequence
  Description of Artificial Sequence: Synthetic oligonucleotide
uguagagguaaccaguagcuuugag

SEQ ID NO: 182 - RNA, 25 nt, Artificial Sequence
  Description of Artificial Sequence: Synthetic oligonucleotide
caaccacaugccacguaauauuuca

SEQ ID NO: 183 - RNA, 25 nt, Artificial Sequence
  Description of Artificial Sequence: Synthetic oligonucleotide
ucggaaacaaguuauucucuucacu

SEQ ID NO: 184 - RNA, 25 nt, Artificial Sequence
  Description of Artificial Sequence: Synthetic oligonucleotide
acucccaauaacuaaugcuaagaaa

SEQ ID NO: 185 - RNA, 25 nt, Artificial Sequence
  Description of Artificial Sequence: Synthetic oligonucleotide
aaugcuaagaaaugcugaaaaucaa

SEQ ID NO: 186 - RNA, 25 nt, Artificial Sequence
  Description of Artificial Sequence: Synthetic oligonucleotide
gucuuucucuaaauaugauuacuuu

SEQ ID NO: 187 - RNA, 25 nt, Artificial Sequence
  Description of Artificial Sequence: Synthetic oligonucleotide
ugaauuucaggcauuuuguucuaca

SEQ ID NO: 188 - RNA, 25 nt, Artificial Sequence
  Description of Artificial Sequence: Synthetic oligonucleotide
cgauucccucucacccgggacucuc

SEQ ID NO: 189 - RNA, 25 nt, Artificial Sequence
  Description of Artificial Sequence: Synthetic oligonucleotide
aggaaagugaaccuuuaaaguaaag

SEQ ID NO: 190 - RNA, 25 nt, Artificial Sequence
  Description of Artificial Sequence: Synthetic oligonucleotide
gaggcugcaugcucuggaagccugg

SEQ ID NO: 191 - RNA, 25 nt, Artificial Sequence
  Description of Artificial Sequence: Synthetic oligonucleotide
ucucugaacagaaaacaaaagagag

SEQ ID NO: 192 - RNA, 25 nt, Artificial Sequence
  Description of Artificial Sequence: Synthetic oligonucleotide
aacuuggcuguaaucaguuaugccg

SEQ ID NO: 193 - RNA, 25 nt, Artificial Sequence
  Description of Artificial Sequence: Synthetic oligonucleotide
agaagccaaaauuaaaagaagucca

SEQ ID NO: 194 - RNA, 25 nt, Artificial Sequence
  Description of Artificial Sequence: Synthetic oligonucleotide
auuaaaagaaguccaggugagguua

SEQ ID NO: 195 - RNA, 25 nt, Artificial Sequence
  Description of Artificial Sequence: Synthetic oligonucleotide
gaauccggauuaucgggaagaggac

SEQ ID NO: 196 - RNA, 25 nt, Artificial Sequence
  Description of Artificial Sequence: Synthetic oligonucleotide
aaugugacaucaaagcaaguauugu

SEQ ID NO: 197 - RNA, 25 nt, Artificial Sequence
  Description of Artificial Sequence: Synthetic oligonucleotide
caucaaagcaaguauuguagcacuc

SEQ ID NO: 198 - RNA, 25 nt, Artificial Sequence
  Description of Artificial Sequence: Synthetic oligonucleotide
agagagagaaaacaaaaccacaaau

SEQ ID NO: 199 - RNA, 25 nt, Artificial Sequence
  Description of Artificial Sequence: Synthetic oligonucleotide
ucgcuguaguauuuaagcccauaca

SEQ ID NO: 200 - RNA, 25 nt, Artificial Sequence
  Description of Artificial Sequence: Synthetic oligonucleotide
cgcuguaguauuuaagcccauacag

SEQ ID NO: 201 - RNA, 25 nt, Artificial Sequence
  Description of Artificial Sequence: Synthetic oligonucleotide
auuuaagcccauacagaaaccuucc

SEQ ID NO: 202 - RNA, 25 nt, Artificial Sequence
  Description of Artificial Sequence: Synthetic oligonucleotide
auuaaaauaaacaugguauaccuac

SEQ ID NO: 203 - RNA, 25 nt, Artificial Sequence
  Description of Artificial Sequence: Synthetic oligonucleotide
cuguucugaucggccaguuuucgga

SEQ ID NO: 204 - RNA, 25 nt, Artificial Sequence
  Description of Artificial Sequence: Synthetic oligonucleotide
aaauaauuugaacuuuggaacaggg

SEQ ID NO: 205 - RNA, 25 nt, Artificial Sequence
  Description of Artificial Sequence: Synthetic oligonucleotide
ugcgaccuuaauuuaacuuuccagu

SEQ ID NO: 206 - RNA, 25 nt, Artificial Sequence
  Description of Artificial Sequence: Synthetic oligonucleotide
cugagaaagcuaaaguuugguuuug

SEQ ID NO: 207 - RNA, 25 nt, Artificial Sequence
  Description of Artificial Sequence: Synthetic oligonucleotide
aguaaagaugcuacuucccacugua

SEQ ID NO: 208 - RNA, 25 nt, Artificial Sequence
  Description of Artificial Sequence: Synthetic oligonucleotide
cugcuuaauugcugauaccauauga

SEQ ID NO: 209 - RNA, 25 nt, Artificial Sequence
  Description of Artificial Sequence: Synthetic oligonucleotide
uaccauaugaaugaaacaugggcug

SEQ ID NO: 210 - RNA, 25 nt, Artificial Sequence
  Description of Artificial Sequence: Synthetic oligonucleotide
aacuuucuuauccaacuuuuucaua

SEQ ID NO: 211 - RNA, 25 nt, Artificial Sequence
  Description of Artificial Sequence: Synthetic oligonucleotide
ccuugcaugacaucaugaggccgga

SEQ ID NO: 212 - RNA, 25 nt, Artificial Sequence
  Description of Artificial Sequence: Synthetic oligonucleotide
ugaauuuguauaugacugcauuugu

SEQ ID NO: 213 - RNA, 25 nt, Artificial Sequence
  Description of Artificial Sequence: Synthetic oligonucleotide
gaauccuaguagaauguuuacuacc

SEQ ID NO: 214 - RNA, 25 nt, Artificial Sequence
  Description of Artificial Sequence: Synthetic oligonucleotide
gaaagggaagaauuuuuugaugaaa

SEQ ID NO: 215 - RNA, 25 nt, Artificial Sequence
  Description of Artificial Sequence: Synthetic oligonucleotide
uaucggcaugccagugugugaauuu

SEQ ID NO: 216 - RNA, 25 nt, Artificial Sequence
  Description of Artificial Sequence: Synthetic oligonucleotide
caccucauaguagagcaauguaugu

SEQ ID NO: 217 - RNA, 25 nt, Artificial Sequence
  Description of Artificial Sequence: Synthetic oligonucleotide
ccagaauugccaaagcacauauaua

SEQ ID NO: 218 - RNA, 25 nt, Artificial Sequence
  Description of Artificial Sequence: Synthetic oligonucleotide
uggugaucuggguaauaguuucucc

SEQ ID NO: 219 - RNA, 25 nt, Artificial Sequence
  Description of Artificial Sequence: Synthetic oligonucleotide
gaucuggguaauaguuucuccaaau

SEQ ID NO: 220 - RNA, 25 nt, Artificial Sequence
  Description of Artificial Sequence: Synthetic oligonucleotide
ggaugugaugaauacuuccuagaaa

SEQ ID NO: 221 - RNA, 25 nt, Artificial Sequence
  Description of Artificial Sequence: Synthetic oligonucleotide
cauuuccacagcuacaccauauaug

SEQ ID NO: 222 - RNA, 25 nt, Artificial Sequence
  Description of Artificial Sequence: Synthetic oligonucleotide
acagcuacaccauauaugaauggag

SEQ ID NO: 223 - RNA, 25 nt, Artificial Sequence
  Description of Artificial Sequence: Synthetic oligonucleotide
ugcaguucuuacacgagaagaagau

SEQ ID NO: 224 - RNA, 25 nt, Artificial Sequence
  Description of Artificial Sequence: Synthetic oligonucleotide
acgagaagaagaucauuuacaggga

SEQ ID NO: 225 - RNA, 25 nt, Artificial Sequence
  Description of Artificial Sequence: Synthetic oligonucleotide
cgagaagaagaucauuuacagggac

SEQ ID NO: 226 - RNA, 25 nt, Artificial Sequence
  Description of Artificial Sequence: Synthetic oligonucleotide
aagaagaucauuuacagggaccuga

SEQ ID NO: 227 - RNA, 25 nt, Artificial Sequence
  Description of Artificial Sequence: Synthetic oligonucleotide
agaggaagagguguuugacugcauc

SEQ ID NO: 228 - RNA, 25 nt, Artificial Sequence
  Description of Artificial Sequence: Synthetic oligonucleotide
gaggaagagguguuugacugcaucg

SEQ ID NO: 229 - RNA, 25 nt, Artificial Sequence
  Description of Artificial Sequence: Synthetic oligonucleotide
cuacuuugagggcgaguucacaggg

SEQ ID NO: 230 - RNA, 25 nt, Artificial Sequence
  Description of Artificial Sequence: Synthetic oligonucleotide
agggcaucuccuggcaccucugucc

SEQ ID NO: 231 - RNA, 25 nt, Artificial Sequence
  Description of Artificial Sequence: Synthetic oligonucleotide
ggagugauaugguuugucuuuuuaa

SEQ ID NO: 232 - RNA, 25 nt, Artificial Sequence
  Description of Artificial Sequence: Synthetic oligonucleotide
gagugauaugguuugucuuuuuaag

SEQ ID NO: 233 - RNA, 25 nt, Artificial Sequence
  Description of Artificial Sequence: Synthetic oligonucleotide
ugcaguaaagauccuaaagguuguc

SEQ ID NO: 234 - RNA, 25 nt, Artificial Sequence
  Description of Artificial Sequence: Synthetic oligonucleotide
aguaaagauccuaaagguugucgac

SEQ ID NO: 235 - RNA, 25 nt, Artificial Sequence
  Description of Artificial Sequence: Synthetic oligonucleotide
ugacaaaggacaaccuggcaauugu

SEQ ID NO: 236 - RNA, 25 nt, Artificial Sequence
  Description of Artificial Sequence: Synthetic oligonucleotide
gcaauugugacccaguggugcgagg

SEQ ID NO: 237 - RNA, 25 nt, Artificial Sequence
  Description of Artificial Sequence: Synthetic oligonucleotide
aacaucauccauagagacaugaaau

SEQ ID NO: 238 - RNA, 25 nt, Artificial Sequence
  Description of Artificial Sequence: Synthetic oligonucleotide
ugaaauccaacaauauauuucucca

SEQ ID NO: 239 - RNA, 25 nt, Artificial Sequence
  Description of Artificial Sequence: Synthetic oligonucleotide
aacaauauauuucuccaugaaggcu

SEQ ID NO: 240 - RNA, 25 nt, Artificial Sequence
  Description of Artificial Sequence: Synthetic oligonucleotide
aacaguaaagucacgcuggaguggu

SEQ ID NO: 241 - RNA, 25 nt, Artificial Sequence
  Description of Artificial Sequence: Synthetic oligonucleotide
ugugaagaaaguaaaggaagagagg

SEQ ID NO: 242 - RNA, 25 nt, Artificial Sequence
  Description of Artificial Sequence: Synthetic oligonucleotide
cuuccgagccauccuugcaucgggc

SEQ ID NO: 243 - RNA, 25 nt, Artificial Sequence
  Description of Artificial Sequence: Synthetic oligonucleotide
aauggagguugaauauccuacugug

SEQ ID NO: 244 - RNA, 25 nt, Artificial Sequence
  Description of Artificial Sequence: Synthetic oligonucleotide
ggagguugaauauccuacuguguaa

SEQ ID NO: 245 - RNA, 25 nt, Artificial Sequence
  Description of Artificial Sequence: Synthetic oligonucleotide
auuuugaguuuucccuuguagugua

SEQ ID NO: 246 - RNA, 25 nt, Artificial Sequence
  Description of Artificial Sequence: Synthetic oligonucleotide
uauccuguuuguucuuuguugauug

SEQ ID NO: 247 - RNA, 25 nt, Artificial Sequence
  Description of Artificial Sequence: Synthetic oligonucleotide
ccuguuuguucuuuguugauugaaa

SEQ ID NO: 248 - RNA, 25 nt, Artificial Sequence
  Description of Artificial Sequence: Synthetic oligonucleotide
cucuacagccuucuuuuucuuccau

SEQ ID NO: 249 - RNA, 25 nt, Artificial Sequence
  Description of Artificial Sequence: Synthetic oligonucleotide
ucuuccauagcuaaucuuccuucua

SEQ ID NO: 250 - RNA, 25 nt, Artificial Sequence
  Description of Artificial Sequence: Synthetic oligonucleotide
auaaucuuccuguugaaugcuucau

SEQ ID NO: 251 - RNA, 25 nt, Artificial Sequence
  Description of Artificial Sequence: Synthetic oligonucleotide
uaaucuuccuguugaaugcuucaug

SEQ ID NO: 252 - RNA, 25 nt, Artificial Sequence
  Description of Artificial Sequence: Synthetic oligonucleotide
cuucaugacuugaauucuacuuuga

SEQ ID NO: 253 - RNA, 25 nt, Artificial Sequence
  Description of Artificial Sequence: Synthetic oligonucleotide
aagagggagagaagcaacuacagac

SEQ ID NO: 254 - RNA, 25 nt, Artificial Sequence
  Description of Artificial Sequence: Synthetic oligonucleotide
cgucuccuaccagaccaaggucaac

SEQ ID NO: 255 - RNA, 25 nt, Artificial Sequence
  Description of Artificial Sequence: Synthetic oligonucleotide
gaucaaucggcccgacuaucucgac

SEQ ID NO: 256 - RNA, 25 nt, Artificial Sequence
  Description of Artificial Sequence: Synthetic oligonucleotide
ggacgaacauccaaccuucccaaac

SEQ ID NO: 257 - RNA, 25 nt, Artificial Sequence
  Description of Artificial Sequence: Synthetic oligonucleotide
agggucggaacccaagcuuagaacu

SEQ ID NO: 258 - RNA, 25 nt, Artificial Sequence
  Description of Artificial Sequence: Synthetic oligonucleotide
ucggaacccaagcuuagaacuuuaa

SEQ ID NO: 259 - RNA, 25 nt, Artificial Sequence
  Description of Artificial Sequence: Synthetic oligonucleotide
acccaagcuuagaacuuuaagcaac

SEQ ID NO: 260 - RNA, 25 nt, Artificial Sequence
  Description of Artificial Sequence: Synthetic oligonucleotide
gaacuuuaagcaacaagaccaccac

SEQ ID NO: 261 - RNA, 25 nt, Artificial Sequence
  Description of Artificial Sequence: Synthetic oligonucleotide
acuauucaguggcgagaaauaaagu

SEQ ID NO: 262 - RNA, 25 nt, Artificial Sequence
  Description of Artificial Sequence: Synthetic oligonucleotide
cuauucaguggcgagaaauaaaguu

SEQ ID NO: 263 - RNA, 25 nt, Artificial Sequence
  Description of Artificial Sequence: Synthetic oligonucleotide
aaacacagauaacaggaaaugaucc

SEQ ID NO: 264 - RNA, 25 nt, Artificial Sequence
  Description of Artificial Sequence: Synthetic oligonucleotide
cuuaagaaaagagaagaaaugaaac

SEQ ID NO: 265 - RNA, 25 nt, Artificial Sequence
  Description of Artificial Sequence: Synthetic oligonucleotide
cugaaggaguguguuuccauccucc

SEQ ID NO: 266 - RNA, 25 nt, Artificial Sequence
  Description of Artificial Sequence: Synthetic oligonucleotide
ucaccgcgggacugaaaaucuuuga

SEQ ID NO: 267 - RNA, 25 nt, Artificial Sequence
  Description of Artificial Sequence: Synthetic oligonucleotide
agcagaaauaagcgugccguucagg

SEQ ID NO: 268 - RNA, 25 nt, Artificial Sequence
  Description of Artificial Sequence: Synthetic oligonucleotide
aagcgugccguucaggguccagaag

SEQ ID NO: 269 - RNA, 25 nt, Artificial Sequence
  Description of Artificial Sequence: Synthetic oligonucleotide
agaaacagucacucaagacugcuug

SEQ ID NO: 270 - RNA, 25 nt, Artificial Sequence
  Description of Artificial Sequence: Synthetic oligonucleotide
agaggaagaagguccaugucuuugg

SEQ ID NO: 271 - RNA, 25 nt, Artificial Sequence
  Description of Artificial Sequence: Synthetic oligonucleotide
uguauucaaaauaugccugaaacac

SEQ ID NO: 272 - RNA, 25 nt, Artificial Sequence
  Description of Artificial Sequence: Synthetic oligonucleotide
auuuuccucccuuucucuguaccuc

SEQ ID NO: 273 - RNA, 25 nt, Artificial Sequence
  Description of Artificial Sequence: Synthetic oligonucleotide
caaagaaagauagagcaagacaaga

SEQ ID NO: 274 - RNA, 25 nt, Artificial Sequence
  Description of Artificial Sequence: Synthetic oligonucleotide
aagaaagauagagcaagacaagaaa

SEQ ID NO: 275 - RNA, 25 nt, Artificial Sequence
  Description of Artificial Sequence: Synthetic oligonucleotide
gaaagcauuuguuuguacaagaucc

SEQ ID NO: 276 - RNA, 25 nt, Artificial Sequence
  Description of Artificial Sequence: Synthetic oligonucleotide
ugaguuaaacgaacguacuugcaga

SEQ ID NO: 277 - RNA, 25 nt, Artificial Sequence
  Description of Artificial Sequence: Synthetic oligonucleotide
acugauacagaacgaucgauacaga

SEQ ID NO: 278 - RNA, 25 nt, Artificial Sequence
  Description of Artificial Sequence: Synthetic oligonucleotide
auauuauauauauauaaaaauaaau

SEQ ID NO: 279 - RNA, 25 nt, Artificial Sequence
  Description of Artificial Sequence: Synthetic oligonucleotide
auuauauauauauaaaaauaaauau

SEQ ID NO: 280 - RNA, 25 nt, Artificial Sequence
  Description of Artificial Sequence: Synthetic oligonucleotide
ucacuggauguauuugacugcugug

SEQ ID NO: 281 - RNA, 25 nt, Artificial Sequence
  Description of Artificial Sequence: Synthetic oligonucleotide
cagggaagaggaggagaugagagac

SEQ ID NO: 282 - RNA, 25 nt, Artificial Sequence
  Description of Artificial Sequence: Synthetic oligonucleotide
augaucuuuuuuuugucccacuugg

SEQ ID NO: 283 - RNA, 27 nt, Artificial Sequence
  Description of Artificial Sequence: Synthetic oligonucleotide
ggccgugaacuccucaucaaaauaccu

SEQ ID NO: 284 - RNA, 27 nt, Artificial Sequence
  Description of Artificial Sequence: Synthetic oligonucleotide
uggugugauggugaucaucugggccgu

SEQ ID NO: 285 - RNA, 27 nt, Artificial Sequence
  Description of Artificial Sequence: Synthetic oligonucleotide
aaacccgcaggauaguuuucuucccua

SEQ ID NO: 286 - RNA, 27 nt, Artificial Sequence
  Description of Artificial Sequence: Synthetic oligonucleotide
caaacuggaugaaauaaauuaaaaccc

SEQ ID NO: 287 - RNA, 27 nt, Artificial Sequence
  Description of Artificial Sequence: Synthetic oligonucleotide
agaaguccuuaacauuucccuacguga

SEQ ID NO: 288 - RNA, 27 nt, Artificial Sequence
  Description of Artificial Sequence: Synthetic oligonucleotide
cucugucccacuggguaaacccuggcc

SEQ ID NO: 289 - RNA, 27 nt, Artificial Sequence
  Description of Artificial Sequence: Synthetic oligonucleotide
cacaauaacaaauuuaaaccuugcucc

SEQ ID NO: 290 - RNA, 27 nt, Artificial Sequence
  Description of Artificial Sequence: Synthetic oligonucleotide
aaaugcauuugaacaacauaauacaca

SEQ ID NO: 291 - RNA, 27 nt, Artificial Sequence
  Description of Artificial Sequence: Synthetic oligonucleotide
ggcuuuccugucacaaagauuaaaaac

SEQ ID NO: 292 - RNA, 27 nt, Artificial Sequence
  Description of Artificial Sequence: Synthetic oligonucleotide
agggcuuuccugucacaaagauuaaaa

SEQ ID NO: 293 - RNA, 27 nt, Artificial Sequence
  Description of Artificial Sequence: Synthetic oligonucleotide
ggccaugcugggagacauaagcagcag

SEQ ID NO: 294 - RNA, 27 nt, Artificial Sequence
  Description of Artificial Sequence: Synthetic oligonucleotide
ucagggagaagcuucugaaacacuucu

SEQ ID NO: 295 - RNA, 27 nt, Artificial Sequence
  Description of Artificial Sequence: Synthetic oligonucleotide
aagggcuucuuccuuauugauggucag

SEQ ID NO: 296 - RNA, 27 nt, Artificial Sequence
  Description of Artificial Sequence: Synthetic oligonucleotide
ugaagggcuucuuccuuauugaugguc

SEQ ID NO: 297 - RNA, 27 nt, Artificial Sequence
  Description of Artificial Sequence: Synthetic oligonucleotide
cgcugaagggcuucuuccuuauugaug

SEQ ID NO: 298 - RNA, 27 nt, Artificial Sequence
  Description of Artificial Sequence: Synthetic oligonucleotide
gccgcugaagggcuucuuccuuauuga

SEQ ID NO: 299 - RNA, 27 nt, Artificial Sequence
  Description of Artificial Sequence: Synthetic oligonucleotide
acuggccgcugaagggcuucuuccuua

SEQ ID NO: 300 - RNA, 27 nt, Artificial Sequence
  Description of Artificial Sequence: Synthetic oligonucleotide
cggagcuuuucaccuuuaguuaugcuu

SEQ ID NO: 301 - RNA, 27 nt, Artificial Sequence
  Description of Artificial Sequence: Synthetic oligonucleotide
ccggagcuuuucaccuuuaguuaugcu

SEQ ID NO: 302 - RNA, 27 nt, Artificial Sequence
  Description of Artificial Sequence: Synthetic oligonucleotide
cagacuguugacuggcgugauguaguu

SEQ ID NO: 303 - RNA, 27 nt, Artificial Sequence
  Description of Artificial Sequence: Synthetic oligonucleotide
cuuuugaacucugcuuaaauccagugg

SEQ ID NO: 304 - RNA, 27 nt, Artificial Sequence
  Description of Artificial Sequence: Synthetic oligonucleotide
gcuuuugaacucugcuuaaauccagug

SEQ ID NO: 305 - RNA, 27 nt, Artificial Sequence
  Description of Artificial Sequence: Synthetic oligonucleotide
agggcuuuugaacucugcuuaaaucca

SEQ ID NO: 306 - RNA, 27 nt, Artificial Sequence
  Description of Artificial Sequence: Synthetic oligonucleotide
aagggcuuuugaacucugcuuaaaucc

SEQ ID NO: 307 - RNA, 27 nt, Artificial Sequence
  Description of Artificial Sequence: Synthetic oligonucleotide
ugaagggcuuuugaacucugcuuaaau

SEQ ID NO: 308 - RNA, 27 nt, Artificial Sequence
  Description of Artificial Sequence: Synthetic oligonucleotide
cugaagggcuuuugaacucugcuuaaa

SEQ ID NO: 309 - RNA, 27 nt, Artificial Sequence
  Description of Artificial Sequence: Synthetic oligonucleotide
cgcugaagggcuuuugaacucugcuua

SEQ ID NO: 310 - RNA, 27 nt, Artificial Sequence
  Description of Artificial Sequence: Synthetic oligonucleotide
cgagcggcuucacucagacccugaggc

SEQ ID NO: 311 - RNA, 27 nt, Artificial Sequence
  Description of Artificial Sequence: Synthetic oligonucleotide
uugacuggcgugauguaguugcuuggg

SEQ ID NO: 312 - RNA, 27 nt, Artificial Sequence
  Description of Artificial Sequence: Synthetic oligonucleotide
cacgcaccaagaagcugccauugaucc

SEQ ID NO: 313 - RNA, 27 nt, Artificial Sequence
  Description of Artificial Sequence: Synthetic oligonucleotide
cugaugaauccaaugugggcuggaauc

SEQ ID NO: 314 - RNA, 27 nt, Artificial Sequence
  Description of Artificial Sequence: Synthetic oligonucleotide
cuuagguauuccacauucucagcugug

SEQ ID NO: 315 - RNA, 27 nt, Artificial Sequence
  Description of Artificial Sequence: Synthetic oligonucleotide
ugagccucaaauuaggagauacguuuu

SEQ ID NO: 316 - RNA, 27 nt, Artificial Sequence
  Description of Artificial Sequence: Synthetic oligonucleotide
ccaauuguagagaaauuauuuuaggaa

SEQ ID NO: 317 - RNA, 27 nt, Artificial Sequence
  Description of Artificial Sequence: Synthetic oligonucleotide
ggcuccuaacuagcugaaucuuccaau

SEQ ID NO: 318 - RNA, 27 nt, Artificial Sequence
  Description of Artificial Sequence: Synthetic oligonucleotide
guggauauugacuaggagaguuuaaaa

SEQ ID NO: 319 - RNA, 27 nt, Artificial Sequence
  Description of Artificial Sequence: Synthetic oligonucleotide
ugugacugaacauaacuguaggcugaa

SEQ ID NO: 320 - RNA, 27 nt, Artificial Sequence
  Description of Artificial Sequence: Synthetic oligonucleotide
guaugugugugugacugaacauaacug

SEQ ID NO: 321 - RNA, 27 nt, Artificial Sequence
  Description of Artificial Sequence: Synthetic oligonucleotide
aagcaaaaggaacauuuuguaugugug

SEQ ID NO: 322 - RNA, 27 nt, Artificial Sequence
  Description of Artificial Sequence: Synthetic oligonucleotide
aaaaauuacuuuaaaagcaaaaggaac

SEQ ID NO: 323 - RNA, 27 nt, Artificial Sequence
  Description of Artificial Sequence: Synthetic oligonucleotide
ccauugacuguugcuucacaggucaga

SEQ ID NO: 324 - RNA, 27 nt, Artificial Sequence
  Description of Artificial Sequence: Synthetic oligonucleotide
auugguuugucgaugugugagauaguu

SEQ ID NO: 325 - RNA, 27 nt, Artificial Sequence
  Description of Artificial Sequence: Synthetic oligonucleotide
agugguagcaguacaauugaggacaag

SEQ ID NO: 326 - RNA, 27 nt, Artificial Sequence
  Description of Artificial Sequence: Synthetic oligonucleotide
uaagaccgcuugccagcuacgguuuca

SEQ ID NO: 327 - RNA, 27 nt, Artificial Sequence
  Description of Artificial Sequence: Synthetic oligonucleotide
agccgguaagaccgcuugccagcuacg

SEQ ID NO: 328 - RNA, 27 nt, Artificial Sequence
  Description of Artificial Sequence: Synthetic oligonucleotide
gguaacccaucuuuuaaccauacaacu

SEQ ID NO: 329 - RNA, 27 nt, Artificial Sequence
  Description of Artificial Sequence: Synthetic oligonucleotide
ucgcagguaacccaucuuuuaaccaua

SEQ ID NO: 330 - RNA, 27 nt, Artificial Sequence
  Description of Artificial Sequence: Synthetic oligonucleotide
cucagcaagauuguauaauucccugca

SEQ ID NO: 331 - RNA, 27 nt, Artificial Sequence
  Description of Artificial Sequence: Synthetic oligonucleotide
acuguuuuaugcucagcaagauuguau

SEQ ID NO: 332 - RNA, 27 nt, Artificial Sequence
  Description of Artificial Sequence: Synthetic oligonucleotide
aggauaaaggacucuucauuauuggaa

SEQ ID NO: 333 - RNA, 27 nt, Artificial Sequence
  Description of Artificial Sequence: Synthetic oligonucleotide
caacuugcguuggaacauccaaagugu

SEQ ID NO: 334 - RNA, 27 nt, Artificial Sequence
  Description of Artificial Sequence: Synthetic oligonucleotide
augguuucaguuuaguggaagcauuua

SEQ ID NO: 335 - RNA, 27 nt, Artificial Sequence
  Description of Artificial Sequence: Synthetic oligonucleotide
auauuuaacaaagucaaacuuucucac

SEQ ID NO: 336 - RNA, 27 nt, Artificial Sequence
  Description of Artificial Sequence: Synthetic oligonucleotide
aacuuuuaauauacaguaguucuuuuc

SEQ ID NO: 337 - RNA, 27 nt, Artificial Sequence
  Description of Artificial Sequence: Synthetic oligonucleotide
guuaagucaaaacccguauuucuaaag

SEQ ID NO: 338 - RNA, 27 nt, Artificial Sequence
  Description of Artificial Sequence: Synthetic oligonucleotide
gugcugaguuugcuguacccauguuga

SEQ ID NO: 339 - RNA, 27 nt, Artificial Sequence
  Description of Artificial Sequence: Synthetic oligonucleotide
ugaggucagcaucuucugugucuuuac

SEQ ID NO: 340 - RNA, 27 nt, Artificial Sequence
  Description of Artificial Sequence: Synthetic oligonucleotide
gcgaucugaauaaaccucccuacuagc

SEQ ID NO: 341 - RNA, 27 nt, Artificial Sequence
  Description of Artificial Sequence: Synthetic oligonucleotide
aucccagaacccugcugcagaaggcca

SEQ ID NO: 342 - RNA, 27 nt, Artificial Sequence
  Description of Artificial Sequence: Synthetic oligonucleotide
cauaauuuccaauauguaccagaccuu

SEQ ID NO: 343 - RNA, 27 nt, Artificial Sequence
  Description of Artificial Sequence: Synthetic oligonucleotide
cuagugcuuccaucggaaggacuaggu

SEQ ID NO: 344 - RNA, 27 nt, Artificial Sequence
  Description of Artificial Sequence: Synthetic oligonucleotide
uccacauaaaaacaauauucacuggga

SEQ ID NO: 345 - RNA, 27 nt, Artificial Sequence
  Description of Artificial Sequence: Synthetic oligonucleotide
ucuaccaauuccaacuugaauucauug

SEQ ID NO: 346 - RNA, 27 nt, Artificial Sequence
  Description of Artificial Sequence: Synthetic oligonucleotide
ucuccaagucuaaaucuguguccugag

SEQ ID NO: 347 - RNA, 27 nt, Artificial Sequence
  Description of Artificial Sequence: Synthetic oligonucleotide
uggaauacuguaacugugcuuugagga

SEQ ID NO: 348 - RNA, 27 nt, Artificial Sequence
  Description of Artificial Sequence: Synthetic oligonucleotide
uuaauucaucagugguggcagugguag

SEQ ID NO: 349 - RNA, 27 nt, Artificial Sequence
  Description of Artificial Sequence: Synthetic oligonucleotide
gugaugauguggcacuaguaguuucuu

SEQ ID NO: 350 - RNA, 27 nt, Artificial Sequence
  Description of Artificial Sequence: Synthetic oligonucleotide
ucuguuuggugaggcuguccgacuuug

SEQ ID NO: 351 - RNA, 27 nt, Artificial Sequence
  Description of Artificial Sequence: Synthetic oligonucleotide
ccaucauguuccauuuuucgcuuucuc

SEQ ID NO: 352 - RNA, 27 nt, Artificial Sequence
  Description of Artificial Sequence: Synthetic oligonucleotide
gcagucuacaugcuaaaucagagggua

SEQ ID NO: 353 - RNA, 27 nt, Artificial Sequence
  Description of Artificial Sequence: Synthetic oligonucleotide
cauaaauagauccuuaaauagcucaaa

SEQ ID NO: 354 - RNA, 27 nt, Artificial Sequence
  Description of Artificial Sequence: Synthetic oligonucleotide
ugauaauagugcuuuuucaccuuuuuc

SEQ ID NO: 355 - RNA, 27 nt, Artificial Sequence
  Description of Artificial Sequence: Synthetic oligonucleotide
gcagaacugauaauagugcuuuuucac

SEQ ID NO: 356 - RNA, 27 nt, Artificial Sequence
  Description of Artificial Sequence: Synthetic oligonucleotide
guagguuuaaucuuucuuuucagccau

SEQ ID NO: 357 - RNA, 27 nt, Artificial Sequence
  Description of Artificial Sequence: Synthetic oligonucleotide
agaaggauuuuauuauaaggguuuaau

SEQ ID NO: 358 - RNA, 27 nt, Artificial Sequence
  Description of Artificial Sequence: Synthetic oligonucleotide
gucuacagcauuggcuaauaguaugaa

SEQ ID NO: 359 - RNA, 27 nt, Artificial Sequence
  Description of Artificial Sequence: Synthetic oligonucleotide
cuauuccuaucaaaaugcuucugucua

SEQ ID NO: 360 - RNA, 27 nt, Artificial Sequence
  Description of Artificial Sequence: Synthetic oligonucleotide
ucagggccauuaucuuauuugcucuau

SEQ ID NO: 361 - RNA, 27 nt, Artificial Sequence
  Description of Artificial Sequence: Synthetic oligonucleotide
ugcuugaggaagagaaaaauguugguc

SEQ ID NO: 362 - RNA, 27 nt, Artificial Sequence
  Description of Artificial Sequence: Synthetic oligonucleotide
ugggcugaacuuuucucauacuuaaag

SEQ ID NO: 363 - RNA, 27 nt, Artificial Sequence
  Description of Artificial Sequence: Synthetic oligonucleotide
gguucagcagccaucuuuauuccugcg

SEQ ID NO: 364 - RNA, 27 nt, Artificial Sequence
  Description of Artificial Sequence: Synthetic oligonucleotide
ugaagagaacuuggucauucaaauuuc

SEQ ID NO: 365 - RNA, 27 nt, Artificial Sequence
  Description of Artificial Sequence: Synthetic oligonucleotide
cucuaggcuggcuaucuuuauacauac

SEQ ID NO: 366 - RNA, 27 nt, Artificial Sequence
  Description of Artificial Sequence: Synthetic oligonucleotide
acacuucacagagauaguuacagccau

SEQ ID NO: 367 - RNA, 27 nt, Artificial Sequence
  Description of Artificial Sequence: Synthetic oligonucleotide
uugaaauuuucucacacuucacagaga

SEQ ID NO: 368 - RNA, 27 nt, Artificial Sequence
  Description of Artificial Sequence: Synthetic oligonucleotide
ucaggaggauucauuuccuuaaaggaa

SEQ ID NO: 369 - RNA, 27 nt, Artificial Sequence
  Description of Artificial Sequence: Synthetic oligonucleotide
auaugaugucacuuuuuguauccuuga

SEQ ID NO: 370 - RNA, 27 nt, Artificial Sequence
  Description of Artificial Sequence: Synthetic oligonucleotide
uaugaugaagauucaaauugcaucuua

SEQ ID NO: 371 - RNA, 27 nt, Artificial Sequence
  Description of Artificial Sequence: Synthetic oligonucleotide
uuaauagcuagucuucguuuugaacag

SEQ ID NO: 372 - RNA, 27 nt, Artificial Sequence
  Description of Artificial Sequence: Synthetic oligonucleotide
auuuuuaguagagaugagguuucacca

SEQ ID NO: 373 - RNA, 27 nt, Artificial Sequence
  Description of Artificial Sequence: Synthetic oligonucleotide
aggcgagauagagcuucucuuucguuc

SEQ ID NO: 374 - RNA, 27 nt, Artificial Sequence
  Description of Artificial Sequence: Synthetic oligonucleotide
aacuggaccgaaggcgcuuguggagaa

SEQ ID NO: 375 - RNA, 27 nt, Artificial Sequence
  Description of Artificial Sequence: Synthetic oligonucleotide
gcggcuacaucuuuggaaucuucuccu

SEQ ID NO: 376 - RNA, 27 nt, Artificial Sequence
  Description of Artificial Sequence: Synthetic oligonucleotide
caagucuccucauugaauccagauugg

SEQ ID NO: 377 - RNA, 27 nt, Artificial Sequence
  Description of Artificial Sequence: Synthetic oligonucleotide
uccucacuacucucaaaucuguucugg

SEQ ID NO: 378 - RNA, 27 nt, Artificial Sequence
  Description of Artificial Sequence: Synthetic oligonucleotide
uuuguacucaucugcacagcucuggcu

SEQ ID NO: 379 - RNA, 27 nt, Artificial Sequence
  Description of Artificial Sequence: Synthetic oligonucleotide
gcccauuaacaacaacaaucugaggug

SEQ ID NO: 380 - RNA, 27 nt, Artificial Sequence
  Description of Artificial Sequence: Synthetic oligonucleotide
aauaaauuaaaaauaauuaaaauagug

SEQ ID NO: 381 - RNA, 27 nt, Artificial Sequence
  Description of Artificial Sequence: Synthetic oligonucleotide
cauauuuaaauauuaauaaauuaaaaa

SEQ ID NO: 382 - RNA, 27 nt, Artificial Sequence
  Description of Artificial Sequence: Synthetic oligonucleotide
gaaacaaaggauauucaaacugcauag

SEQ ID NO: 383 - RNA, 27 nt, Artificial Sequence
  Description of Artificial Sequence: Synthetic oligonucleotide
caaacacuuagacgccagcagcauggg

SEQ ID NO: 384 - RNA, 27 nt, Artificial Sequence
  Description of Artificial Sequence: Synthetic oligonucleotide
uuugucacaggugaaaugcacaucuga

SEQ ID NO: 385 - RNA, 27 nt, Artificial Sequence
  Description of Artificial Sequence: Synthetic oligonucleotide
uaauucagccuggcacagguuuugauc

SEQ ID NO: 386 - RNA, 27 nt, Artificial Sequence
  Description of Artificial Sequence: Synthetic oligonucleotide
auuguaagaaugacuacccacauucac

SEQ ID NO: 387 - RNA, 27 nt, Artificial Sequence
  Description of Artificial Sequence: Synthetic oligonucleotide
caauuguaagaaugacuacccacauuc

SEQ ID NO: 388 - RNA, 27 nt, Artificial Sequence
  Description of Artificial Sequence: Synthetic oligonucleotide
guacacucucugaugcucauuuucaua

SEQ ID NO: 389 - RNA, 27 nt, Artificial Sequence
  Description of Artificial Sequence: Synthetic oligonucleotide
cugcugaguucuacaugaaaagcaaau

SEQ ID NO: 390 - RNA, 27 nt, Artificial Sequence
  Description of Artificial Sequence: Synthetic oligonucleotide
uacugaaaauaaauauagaaauacaac

SEQ ID NO: 391 - RNA, 27 nt, Artificial Sequence
  Description of Artificial Sequence: Synthetic oligonucleotide
uuccauuuaagaaacauuaaucaaaac

SEQ ID NO: 392 - RNA, 27 nt, Artificial Sequence
  Description of Artificial Sequence: Synthetic oligonucleotide
acaauuuuaggcacuauacacguuguu

SEQ ID NO: 393 - RNA, 27 nt, Artificial Sequence
  Description of Artificial Sequence: Synthetic oligonucleotide
ccagauguuaguagccaaggauauggu

SEQ ID NO: 394 - RNA, 27 nt, Artificial Sequence
  Description of Artificial Sequence: Synthetic oligonucleotide
agcucacagucuccagauguuaguagc

SEQ ID NO: 395 - RNA, 27 nt, Artificial Sequence
  Description of Artificial Sequence: Synthetic oligonucleotide
auuaauaaaaagcacacaacuuauggc

SEQ ID NO: 396 - RNA, 27 nt, Artificial Sequence
  Description of Artificial Sequence: Synthetic oligonucleotide
aauguaagaagagccaaaaugaugcau

SEQ ID NO: 397 - RNA, 27 nt, Artificial Sequence
  Description of Artificial Sequence: Synthetic oligonucleotide
acauuuuuacaaauguaagaagagcca

SEQ ID NO: 398 - RNA, 27 nt, Artificial Sequence
  Description of Artificial Sequence: Synthetic oligonucleotide
aauaugaauuaagaugaccuaaucugu

SEQ ID NO: 399 - RNA, 27 nt, Artificial Sequence
  Description of Artificial Sequence: Synthetic oligonucleotide
ucaugauuaguucuuucaauuccaucc

SEQ ID NO: 400 - RNA, 27 nt, Artificial Sequence
  Description of Artificial Sequence: Synthetic oligonucleotide
cccaagagcagaaggaaugagugugca

SEQ ID NO: 401 - RNA, 27 nt, Artificial Sequence
  Description of Artificial Sequence: Synthetic oligonucleotide
cucaaagcuacugguuaccucuacacc

SEQ ID NO: 402 - RNA, 27 nt, Artificial Sequence
  Description of Artificial Sequence: Synthetic oligonucleotide
ugaaauauuacguggcaugugguuggg

SEQ ID NO: 403 - RNA, 27 nt, Artificial Sequence
  Description of Artificial Sequence: Synthetic oligonucleotide
agugaagagaauaacuuguuuccgaag

SEQ ID NO: 404 - RNA, 27 nt, Artificial Sequence
  Description of Artificial Sequence: Synthetic oligonucleotide
uuucuuagcauuaguuauugggaguga

SEQ ID NO: 405 - RNA, 27 nt, Artificial Sequence
  Description of Artificial Sequence: Synthetic oligonucleotide
uugauuuucagcauuucuuagcauuag

SEQ ID NO: 406 - RNA, 27 nt, Artificial Sequence
  Description of Artificial Sequence: Synthetic oligonucleotide
aaaguaaucauauuuagagaaagacag

SEQ ID NO: 407 - RNA, 27 nt, Artificial Sequence
  Description of Artificial Sequence: Synthetic oligonucleotide
uguagaacaaaaugccugaaauucagc

SEQ ID NO: 408 - RNA, 27 nt, Artificial Sequence
  Description of Artificial Sequence: Synthetic oligonucleotide
gagagucccgggugagagggaaucgcc

SEQ ID NO: 409 - RNA, 27 nt, Artificial Sequence
  Description of Artificial Sequence: Synthetic oligonucleotide
cuuuacuuuaaagguucacuuuccuug

SEQ ID NO: 410 - RNA, 27 nt, Artificial Sequence
  Description of Artificial Sequence: Synthetic oligonucleotide
ccaggcuuccagagcaugcagccuccu

SEQ ID NO: 411 - RNA, 27 nt, Artificial Sequence
  Description of Artificial Sequence: Synthetic oligonucleotide
cucucuuuuguuuucuguucagagaaa

SEQ ID NO: 412 - RNA, 27 nt, Artificial Sequence
  Description of Artificial Sequence: Synthetic oligonucleotide
cggcauaacugauuacagccaaguuca

SEQ ID NO: 413 - RNA, 27 nt, Artificial Sequence
  Description of Artificial Sequence: Synthetic oligonucleotide
uggacuucuuuuaauuuuggcuucuuc

SEQ ID NO: 414 - RNA, 27 nt, Artificial Sequence
  Description of Artificial Sequence: Synthetic oligonucleotide
uaaccucaccuggacuucuuuuaauuu

SEQ ID NO: 415 - RNA, 27 nt, Artificial Sequence
  Description of Artificial Sequence: Synthetic oligonucleotide
guccucuucccgauaauccggauucag

SEQ ID NO: 416 - RNA, 27 nt, Artificial Sequence
  Description of Artificial Sequence: Synthetic oligonucleotide
acaauacuugcuuugaugucacauuaa

SEQ ID NO: 417 - RNA, 27 nt, Artificial Sequence
  Description of Artificial Sequence: Synthetic oligonucleotide
gagugcuacaauacuugcuuugauguc

SEQ ID NO: 418 - RNA, 27 nt, Artificial Sequence
  Description of Artificial Sequence: Synthetic oligonucleotide
auuugugguuuuguuuucucucucucu

SEQ ID NO: 419 - RNA, 27 nt, Artificial Sequence
  Description of Artificial Sequence: Synthetic oligonucleotide
uguaugggcuuaaauacuacagcgagg

SEQ ID NO: 420 - RNA, 27 nt, Artificial Sequence
  Description of Artificial Sequence: Synthetic oligonucleotide
cuguaugggcuuaaauacuacagcgag

SEQ ID NO: 421 - RNA, 27 nt, Artificial Sequence
  Description of Artificial Sequence: Synthetic oligonucleotide
ggaagguuucuguaugggcuuaaauac

SEQ ID NO: 422 - RNA, 27 nt, Artificial Sequence
  Description of Artificial Sequence: Synthetic oligonucleotide
guagguauaccauguuuauuuuaauac

SEQ ID NO: 423 - RNA, 27 nt, Artificial Sequence
  Description of Artificial Sequence: Synthetic oligonucleotide
uccgaaaacuggccgaucagaacagcc

SEQ ID NO: 424 - RNA, 27 nt, Artificial Sequence
  Description of Artificial Sequence: Synthetic oligonucleotide
cccuguuccaaaguucaaauuauuugu

SEQ ID NO: 425 - RNA, 27 nt, Artificial Sequence
  Description of Artificial Sequence: Synthetic oligonucleotide
acuggaaaguuaaauuaaggucgcaau

SEQ ID NO: 426 - RNA, 27 nt, Artificial Sequence
  Description of Artificial Sequence: Synthetic oligonucleotide
caaaaccaaacuuuagcuuucucagcc

SEQ ID NO: 427 - RNA, 27 nt, Artificial Sequence
  Description of Artificial Sequence: Synthetic oligonucleotide
uacagugggaaguagcaucuuuacuuu

SEQ ID NO: 428 - RNA, 27 nt, Artificial Sequence
  Description of Artificial Sequence: Synthetic oligonucleotide
ucauaugguaucagcaauuaagcagua

SEQ ID NO: 429 - RNA, 27 nt, Artificial Sequence
  Description of Artificial Sequence: Synthetic oligonucleotide
cagcccauguuucauucauaugguauc

SEQ ID NO: 430 - RNA, 27 nt, Artificial Sequence
  Description of Artificial Sequence: Synthetic oligonucleotide
uaugaaaaaguuggauaagaaaguugg

SEQ ID NO: 431 - RNA, 27 nt, Artificial Sequence
  Description of Artificial Sequence: Synthetic oligonucleotide
uccggccucaugaugucaugcaaggcu

SEQ ID NO: 432 - RNA, 27 nt, Artificial Sequence
  Description of Artificial Sequence: Synthetic oligonucleotide
acaaaugcagucauauacaaauucagg

SEQ ID NO: 433 - RNA, 27 nt, Artificial Sequence
  Description of Artificial Sequence: Synthetic oligonucleotide
gguaguaaacauucuacuaggauucuu

SEQ ID NO: 434 - RNA, 27 nt, Artificial Sequence
  Description of Artificial Sequence: Synthetic oligonucleotide
uuucaucaaaaaauucuucccuuucug

SEQ ID NO: 435 - RNA, 27 nt, Artificial Sequence
  Description of Artificial Sequence: Synthetic oligonucleotide
aaauucacacacuggcaugccgauagc

SEQ ID NO: 436 - RNA, 27 nt, Artificial Sequence
  Description of Artificial Sequence: Synthetic oligonucleotide
acauacauugcucuacuaugaggugaa

SEQ ID NO: 437 - RNA, 27 nt, Artificial Sequence
  Description of Artificial Sequence: Synthetic oligonucleotide
uauauaugugcuuuggcaauucuggug

SEQ ID NO: 438 - RNA, 27 nt, Artificial Sequence
  Description of Artificial Sequence: Synthetic oligonucleotide
ggagaaacuauuacccagaucaccacu

SEQ ID NO: 439 - RNA, 27 nt, Artificial Sequence
  Description of Artificial Sequence: Synthetic oligonucleotide
auuuggagaaacuauuacccagaucac

SEQ ID NO: 440 - RNA, 27 nt, Artificial Sequence
  Description of Artificial Sequence: Synthetic oligonucleotide
uuucuaggaaguauucaucacauccac

SEQ ID NO: 441 - RNA, 27 nt, Artificial Sequence
  Description of Artificial Sequence: Synthetic oligonucleotide
cauauaugguguagcuguggaaaugcg

SEQ ID NO: 442 - RNA, 27 nt, Artificial Sequence
  Description of Artificial Sequence: Synthetic oligonucleotide
cuccauucauauaugguguagcugugg

SEQ ID NO: 443 - RNA, 27 nt, Artificial Sequence
  Description of Artificial Sequence: Synthetic oligonucleotide
aucuucuucucguguaagaacugcagc

SEQ ID NO: 444 - RNA, 27 nt, Artificial Sequence
  Description of Artificial Sequence: Synthetic oligonucleotide
ucccuguaaaugaucuucuucucgugu

SEQ ID NO: 445 - RNA, 27 nt, Artificial Sequence
  Description of Artificial Sequence: Synthetic oligonucleotide
gucccuguaaaugaucuucuucucgug

SEQ ID NO: 446 - RNA, 27 nt, Artificial Sequence
  Description of Artificial Sequence: Synthetic oligonucleotide
ucaggucccuguaaaugaucuucuucu

SEQ ID NO: 447 - RNA, 27 nt, Artificial Sequence
  Description of Artificial Sequence: Synthetic oligonucleotide
gaugcagucaaacaccucuuccucugu

SEQ ID NO: 448 - RNA, 27 nt, Artificial Sequence
  Description of Artificial Sequence: Synthetic oligonucleotide
cgaugcagucaaacaccucuuccucug

SEQ ID NO: 449 - RNA, 27 nt, Artificial Sequence
  Description of Artificial Sequence: Synthetic oligonucleotide
cccugugaacucgcccucaaaguagcg

SEQ ID NO: 450 - RNA, 27 nt, Artificial Sequence
  Description of Artificial Sequence: Synthetic oligonucleotide
ggacagaggugccaggagaugcccuca

SEQ ID NO: 451 - RNA, 27 nt, Artificial Sequence
  Description of Artificial Sequence: Synthetic oligonucleotide
uuaaaaagacaaaccauaucacuccuu

SEQ ID NO: 452 - RNA, 27 nt, Artificial Sequence
  Description of Artificial Sequence: Synthetic oligonucleotide
cuuaaaaagacaaaccauaucacuccu

SEQ ID NO: 453 - RNA, 27 nt, Artificial Sequence
  Description of Artificial Sequence: Synthetic oligonucleotide
gacaaccuuuaggaucuuuacugcaac

SEQ ID NO: 454 - RNA, 27 nt, Artificial Sequence
  Description of Artificial Sequence: Synthetic oligonucleotide
gucgacaaccuuuaggaucuuuacugc

SEQ ID NO: 455 - RNA, 27 nt, Artificial Sequence
  Description of Artificial Sequence: Synthetic oligonucleotide
acaauugccagguuguccuuugucaug

SEQ ID NO: 456 - RNA, 27 nt, Artificial Sequence
  Description of Artificial Sequence: Synthetic oligonucleotide
ccucgcaccacugggucacaauugcca

SEQ ID NO: 457 - RNA, 27 nt, Artificial Sequence
  Description of Artificial Sequence: Synthetic oligonucleotide
auuucaugucucuauggaugauguucu

SEQ ID NO: 458 - RNA, 27 nt, Artificial Sequence
  Description of Artificial Sequence: Synthetic oligonucleotide
uggagaaauauauuguuggauuucaug

SEQ ID NO: 459 - RNA, 27 nt, Artificial Sequence
  Description of Artificial Sequence: Synthetic oligonucleotide
agccuucauggagaaauauauuguugg

SEQ ID NO: 460 - RNA, 27 nt, Artificial Sequence
  Description of Artificial Sequence: Synthetic oligonucleotide
accacuccagcgugacuuuacuguugc

SEQ ID NO: 461 - RNA, 27 nt, Artificial Sequence
  Description of Artificial Sequence: Synthetic oligonucleotide
ccucucuuccuuuacuuucuucacaca

SEQ ID NO: 462 - RNA, 27 nt, Artificial Sequence
  Description of Artificial Sequence: Synthetic oligonucleotide
gcccgaugcaaggauggcucggaagcg

SEQ ID NO: 463 - RNA, 27 nt, Artificial Sequence
  Description of Artificial Sequence: Synthetic oligonucleotide
cacaguaggauauucaaccuccauuuc

SEQ ID NO: 464 - RNA, 27 nt, Artificial Sequence
  Description of Artificial Sequence: Synthetic oligonucleotide
uuacacaguaggauauucaaccuccau

SEQ ID NO: 465 - RNA, 27 nt, Artificial Sequence
  Description of Artificial Sequence: Synthetic oligonucleotide
uacacuacaagggaaaacucaaaaucu

SEQ ID NO: 466 - RNA, 27 nt, Artificial Sequence
  Description of Artificial Sequence: Synthetic oligonucleotide
caaucaacaaagaacaaacaggauaaa

SEQ ID NO: 467 - RNA, 27 nt, Artificial Sequence
  Description of Artificial Sequence: Synthetic oligonucleotide
uuucaaucaacaaagaacaaacaggau

SEQ ID NO: 468 - RNA, 27 nt, Artificial Sequence
  Description of Artificial Sequence: Synthetic oligonucleotide
auggaagaaaaagaaggcuguagagaa

SEQ ID NO: 469 - RNA, 27 nt, Artificial Sequence
  Description of Artificial Sequence: Synthetic oligonucleotide
uagaaggaagauuagcuauggaagaaa

SEQ ID NO: 470 - RNA, 27 nt, Artificial Sequence
  Description of Artificial Sequence: Synthetic oligonucleotide
augaagcauucaacaggaagauuauuu

SEQ ID NO: 471 - RNA, 27 nt, Artificial Sequence
  Description of Artificial Sequence: Synthetic oligonucleotide
caugaagcauucaacaggaagauuauu

SEQ ID NO: 472 - RNA, 27 nt, Artificial Sequence
  Description of Artificial Sequence: Synthetic oligonucleotide
ucaaaguagaauucaagucaugaagca

SEQ ID NO: 473 - RNA, 27 nt, Artificial Sequence
  Description of Artificial Sequence: Synthetic oligonucleotide
gucuguaguugcuucucucccucuuag

SEQ ID NO: 474 - RNA, 27 nt, Artificial Sequence
  Description of Artificial Sequence: Synthetic oligonucleotide
guugaccuuggucugguaggagacggc

SEQ ID NO: 475 - RNA, 27 nt, Artificial Sequence
  Description of Artificial Sequence: Synthetic oligonucleotide
gucgagauagucgggccgauugaucuc

SEQ ID NO: 476 - RNA, 27 nt, Artificial Sequence
  Description of Artificial Sequence: Synthetic oligonucleotide
guuugggaagguuggauguucguccuc

SEQ ID NO: 477 - RNA, 27 nt, Artificial Sequence
  Description of Artificial Sequence: Synthetic oligonucleotide
aguucuaagcuuggguuccgacccuaa

SEQ ID NO: 478 - RNA, 27 nt, Artificial Sequence
  Description of Artificial Sequence: Synthetic oligonucleotide
uuaaaguucuaagcuuggguuccgacc

SEQ ID NO: 479 - RNA, 27 nt, Artificial Sequence
  Description of Artificial Sequence: Synthetic oligonucleotide
guugcuuaaaguucuaagcuuggguuc

SEQ ID NO: 480 - RNA, 27 nt, Artificial Sequence
  Description of Artificial Sequence: Synthetic oligonucleotide
gugguggucuuguugcuuaaaguucua

SEQ ID NO: 481 - RNA, 27 nt, Artificial Sequence
  Description of Artificial Sequence: Synthetic oligonucleotide
acuuuauuucucgccacugaauaguag

SEQ ID NO: 482 - RNA, 27 nt, Artificial Sequence
  Description of Artificial Sequence: Synthetic oligonucleotide
aacuuuauuucucgccacugaauagua

SEQ ID NO: 483 - RNA, 27 nt, Artificial Sequence
  Description of Artificial Sequence: Synthetic oligonucleotide
ggaucauuuccuguuaucuguguuugu

SEQ ID NO: 484 - RNA, 27 nt, Artificial Sequence
  Description of Artificial Sequence: Synthetic oligonucleotide
guuucauuucuucucuuuucuuaaggc

SEQ ID NO: 485 - RNA, 27 nt, Artificial Sequence
  Description of Artificial Sequence: Synthetic oligonucleotide
ggaggauggaaacacacuccuucaguu

SEQ ID NO: 486 - RNA, 27 nt, Artificial Sequence
  Description of Artificial Sequence: Synthetic oligonucleotide
ucaaagauuuucagucccgcggugaca

SEQ ID NO: 487 - RNA, 27 nt, Artificial Sequence
  Description of Artificial Sequence: Synthetic oligonucleotide
ccugaacggcacgcuuauuucugcugu

SEQ ID NO: 488 - RNA, 27 nt, Artificial Sequence
  Description of Artificial Sequence: Synthetic oligonucleotide
cuucuggacccugaacggcacgcuuau

SEQ ID NO: 489 - RNA, 27 nt, Artificial Sequence
  Description of Artificial Sequence: Synthetic oligonucleotide
caagcagucuugagugacuguuucuuc

SEQ ID NO: 490 - RNA, 27 nt, Artificial Sequence
  Description of Artificial Sequence: Synthetic oligonucleotide
ccaaagacauggaccuucuuccucuga

SEQ ID NO: 491 - RNA, 27 nt, Artificial Sequence
  Description of Artificial Sequence: Synthetic oligonucleotide
guguuucaggcauauuuugaauacauc

SEQ ID NO: 492 - RNA, 27 nt, Artificial Sequence
  Description of Artificial Sequence: Synthetic oligonucleotide
gagguacagagaaagggaggaaaauag

SEQ ID NO: 493 - RNA, 27 nt, Artificial Sequence
  Description of Artificial Sequence: Synthetic oligonucleotide
ucuugucuugcucuaucuuucuuuggu

SEQ ID NO: 494 - RNA, 27 nt, Artificial Sequence
  Description of Artificial Sequence: Synthetic oligonucleotide
uuucuugucuugcucuaucuuucuuug

SEQ ID NO: 495 - RNA, 27 nt, Artificial Sequence
  Description of Artificial Sequence: Synthetic oligonucleotide
ggaucuuguacaaacaaaugcuuucuc

SEQ ID NO: 496 - RNA, 27 nt, Artificial Sequence
  Description of Artificial Sequence: Synthetic oligonucleotide
ucugcaaguacguucguuuaacucaag

SEQ ID NO: 497 - RNA, 27 nt, Artificial Sequence
  Description of Artificial Sequence: Synthetic oligonucleotide
ucuguaucgaucguucuguaucagucu

SEQ ID NO: 498 - RNA, 27 nt, Artificial Sequence
  Description of Artificial Sequence: Synthetic oligonucleotide
auuuauuuuuauauauauauaauauau

SEQ ID NO: 499 - RNA, 27 nt, Artificial Sequence
  Description of Artificial Sequence: Synthetic oligonucleotide
auauuuauuuuuauauauauauaauau

SEQ ID NO: 500 - RNA, 27 nt, Artificial Sequence
  Description of Artificial Sequence: Synthetic oligonucleotide
cacagcagucaaauacauccagugaag

SEQ ID NO: 501 - RNA, 27 nt, Artificial Sequence
  Description of Artificial Sequence: Synthetic oligonucleotide
gucucucaucuccuccucuucccuguc

SEQ ID NO: 502 - RNA, 27 nt, Artificial Sequence
  Description of Artificial Sequence: Synthetic oligonucleotide
ccaagugggacaaaaaaaagaucaugc

SEQ ID NO: 503 - RNA, 14 nt, Artificial Sequence
  Description of Artificial Sequence: Synthetic oligonucleotide
guauuuugaugagg

SEQ ID NO: 504 - RNA, 12 nt, Artificial Sequence
  Description of Artificial Sequence: Synthetic oligonucleotide
ggcccagaugau

SEQ ID NO: 505 - RNA, 14 nt, Artificial Sequence
  Description of Artificial Sequence: Synthetic oligonucleotide
gggaagaaaacuau

SEQ ID NO: 506 - RNA, 15 nt, Artificial Sequence
  Description of Artificial Sequence: Synthetic oligonucleotide
guuuuaauuuauuuc

SEQ ID NO: 507 - RNA, 12 nt, Artificial Sequence
  Description of Artificial Sequence: Synthetic oligonucleotide
acguagggaaau

SEQ ID NO: 508 - RNA, 12 nt, Artificial Sequence
  Description of Artificial Sequence: Synthetic oligonucleotide
ccaggguuuacc

SEQ ID NO: 509 - RNA, 11 nt, Artificial Sequence
  Description of Artificial Sequence: Synthetic oligonucleotide
agcaagguuua

SEQ ID NO: 510 - RNA, 12 nt, Artificial Sequence
  Description of Artificial Sequence: Synthetic oligonucleotide
uguauuauguug

SEQ ID NO: 511 - RNA, 15 nt, Artificial Sequence
  Description of Artificial Sequence: Synthetic oligonucleotide
uuuuaaucuuuguga

SEQ ID NO: 512 - RNA, 14 nt, Artificial Sequence
  Description of Artificial Sequence: Synthetic oligonucleotide
uuaaucuuugugac

SEQ ID NO: 513 - RNA, 13 nt, Artificial Sequence
  Description of Artificial Sequence: Synthetic oligonucleotide
gcugcuuaugucu

SEQ ID NO: 514 - RNA, 14 nt, Artificial Sequence
  Description of Artificial Sequence: Synthetic oligonucleotide
aaguguuucagaag

SEQ ID NO: 515 - RNA, 13 nt, Artificial Sequence
  Description of Artificial Sequence: Synthetic oligonucleotide
gaccaucaauaag

SEQ ID NO: 516 - RNA, 13 nt, Artificial Sequence
  Description of Artificial Sequence: Synthetic oligonucleotide
ccaucaauaagga

SEQ ID NO: 517 - RNA, 14 nt, Artificial Sequence
  Description of Artificial Sequence: Synthetic oligonucleotide
ucaauaaggaagaa

SEQ ID NO: 518 - RNA, 14 nt, Artificial Sequence
  Description of Artificial Sequence: Synthetic oligonucleotide
aauaaggaagaagc

SEQ ID NO: 519 - RNA, 13 nt, Artificial Sequence
  Description of Artificial Sequence: Synthetic oligonucleotide
aggaagaagcccu

SEQ ID NO: 520 - RNA, 13 nt, Artificial Sequence
  Description of Artificial Sequence: Synthetic oligonucleotide
gcauaacuaaagg

SEQ ID NO: 521 - RNA, 14 nt, Artificial Sequence
  Description of Artificial Sequence: Synthetic oligonucleotide
cauaacuaaaggug

SEQ ID NO: 522 - RNA, 12 nt, Artificial Sequence
  Description of Artificial Sequence: Synthetic oligonucleotide
cuacaucacgcc

SEQ ID NO: 523 - RNA, 12 nt, Artificial Sequence
  Description of Artificial Sequence: Synthetic oligonucleotide
acuggauuuaag

SEQ ID NO: 524 - RNA, 12 nt, Artificial Sequence
  Description of Artificial Sequence: Synthetic oligonucleotide
cuggauuuaagc

SEQ ID NO: 525 - RNA, 13 nt, Artificial Sequence
  Description of Artificial Sequence: Synthetic oligonucleotide
gauuuaagcagag

SEQ ID NO: 526 - RNA, 13 nt, Artificial Sequence
  Description of Artificial Sequence: Synthetic oligonucleotide
auuuaagcagagu

SEQ ID NO: 527 - RNA, 13 nt, Artificial Sequence
  Description of Artificial Sequence: Synthetic oligonucleotide
uuaagcagaguuc

SEQ ID NO: 528 - RNA, 13 nt, Artificial Sequence
  Description of Artificial Sequence: Synthetic oligonucleotide
uaagcagaguuca

SEQ ID NO: 529 - RNA, 14 nt, Artificial Sequence
  Description of Artificial Sequence: Synthetic oligonucleotide
agcagaguucaaaa

SEQ ID NO: 530 - RNA, 12 nt, Artificial Sequence
  Description of Artificial Sequence: Synthetic oligonucleotide
cucagggucuga

SEQ ID NO: 531 - RNA, 13 nt, Artificial Sequence
  Description of Artificial Sequence: Synthetic oligonucleotide
caagcaacuacau

SEQ ID NO: 532 - RNA, 12 nt, Artificial Sequence
  Description of Artificial Sequence: Synthetic oligonucleotide
aucaauggcagc

SEQ ID NO: 533 - RNA, 11 nt, Artificial Sequence
  Description of Artificial Sequence: Synthetic oligonucleotide
uuccagcccac

SEQ ID NO: 534 - RNA, 12 nt, Artificial Sequence
  Description of Artificial Sequence: Synthetic oligonucleotide
cagcugagaaug

SEQ ID NO: 535 - RNA, 13 nt, Artificial Sequence
  Description of Artificial Sequence: Synthetic oligonucleotide
aacguaucuccua

SEQ ID NO: 536 - RNA, 14 nt, Artificial Sequence
  Description of Artificial Sequence: Synthetic oligonucleotide
ccuaaaauaauuuc

SEQ ID NO: 537 - RNA, 13 nt, Artificial Sequence
  Description of Artificial Sequence: Synthetic oligonucleotide
uggaagauucagc

SEQ ID NO: 538 - RNA, 12 nt, Artificial Sequence
  Description of Artificial Sequence: Synthetic oligonucleotide
uuaaacucuccu

SEQ ID NO: 539 - RNA, 12 nt, Artificial Sequence
  Description of Artificial Sequence: Synthetic oligonucleotide
cagccuacaguu

SEQ ID NO: 540 - RNA, 13 nt, Artificial Sequence
  Description of Artificial Sequence: Synthetic oligonucleotide
guuauguucaguc

SEQ ID NO: 541 - RNA, 13 nt, Artificial Sequence
  Description of Artificial Sequence: Synthetic oligonucleotide
cacauacaaaaug

SEQ ID NO: 542 - RNA, 9 nt, Artificial Sequence
  Description of Artificial Sequence: Synthetic oligonucleotide
uccuuuugc

SEQ ID NO: 543 - RNA, 12 nt, Artificial Sequence
  Description of Artificial Sequence: Synthetic oligonucleotide
ugaccugugaag

SEQ ID NO: 544 - RNA, 12 nt, Artificial Sequence
  Description of Artificial Sequence: Synthetic oligonucleotide
cuaucucacaca

SEQ ID NO: 545 - RNA, 13 nt, Artificial Sequence
  Description of Artificial Sequence: Synthetic oligonucleotide
uguccucaauugu

SEQ ID NO: 546 - RNA, 12 nt, Artificial Sequence
  Description of Artificial Sequence: Synthetic oligonucleotide
aaaccguagcug

SEQ ID NO: 547 - RNA, 12 nt, Artificial Sequence
  Description of Artificial Sequence: Synthetic oligonucleotide
uagcuggcaagc

SEQ ID NO: 548 - RNA, 14 nt, Artificial Sequence
  Description of Artificial Sequence: Synthetic oligonucleotide
uuguaugguuaaaa

SEQ ID NO: 549 - RNA, 14 nt, Artificial Sequence
  Description of Artificial Sequence: Synthetic oligonucleotide
ugguuaaaagaugg

SEQ ID NO: 550 - RNA, 13 nt, Artificial Sequence
  Description of Artificial Sequence: Synthetic oligonucleotide
cagggaauuauac

SEQ ID NO: 551 - RNA, 12 nt, Artificial Sequence
  Description of Artificial Sequence: Synthetic oligonucleotide
acaaucuugcug

SEQ ID NO: 552 - RNA, 13 nt, Artificial Sequence
  Description of Artificial Sequence: Synthetic oligonucleotide
ccaauaaugaaga

SEQ ID NO: 553 - RNA, 13 nt, Artificial Sequence
  Description of Artificial Sequence: Synthetic oligonucleotide
acuuuggauguuc

SEQ ID NO: 554 - RNA, 12 nt, Artificial Sequence
  Description of Artificial Sequence: Synthetic oligonucleotide
aaugcuuccacu

SEQ ID NO: 555 - RNA, 11 nt, Artificial Sequence
  Description of Artificial Sequence: Synthetic oligonucleotide
gagaaaguuug

SEQ ID NO: 556 - RNA, 11 nt, Artificial Sequence
  Description of Artificial Sequence: Synthetic oligonucleotide
aaagaacuacu

SEQ ID NO: 557 - RNA, 12 nt, Artificial Sequence
  Description of Artificial Sequence: Synthetic oligonucleotide
uuagaaauacgg

SEQ ID NO: 558 - RNA, 12 nt, Artificial Sequence
  Description of Artificial Sequence: Synthetic oligonucleotide
aacauggguaca

SEQ ID NO: 559 - RNA, 14 nt, Artificial Sequence
  Description of Artificial Sequence: Synthetic oligonucleotide
aaagacacagaaga

SEQ ID NO: 560 - RNA, 11 nt, Artificial Sequence
  Description of Artificial Sequence: Synthetic oligonucleotide
uaguagggagg

SEQ ID NO: 561 - RNA, 12 nt, Artificial Sequence
  Description of Artificial Sequence: Synthetic oligonucleotide
gccuucugcagc

SEQ ID NO: 562 - RNA, 10 nt, Artificial Sequence
  Description of Artificial Sequence: Synthetic oligonucleotide
ggucugguac

SEQ ID NO: 563 - RNA, 12 nt, Artificial Sequence
  Description of Artificial Sequence: Synthetic oligonucleotide
cuaguccuuccg

SEQ ID NO: 564 - RNA, 12 nt, Artificial Sequence
  Description of Artificial Sequence: Synthetic oligonucleotide
ccagugaauauu

SEQ ID NO: 565 - RNA, 13 nt, Artificial Sequence
  Description of Artificial Sequence: Synthetic oligonucleotide
augaauucaaguu

SEQ ID NO: 566 - RNA, 12 nt, Artificial Sequence
  Description of Artificial Sequence: Synthetic oligonucleotide
caggacacagau

SEQ ID NO: 567 - RNA, 12 nt, Artificial Sequence
  Description of Artificial Sequence: Synthetic oligonucleotide
cucaaagcacag

SEQ ID NO: 568 - RNA, 10 nt, Artificial Sequence
  Description of Artificial Sequence: Synthetic oligonucleotide
accacugcca

SEQ ID NO: 569 - RNA, 13 nt, Artificial Sequence
  Description of Artificial Sequence: Synthetic oligonucleotide
gaaacuacuagug

SEQ ID NO: 570 - RNA, 12 nt, Artificial Sequence
  Description of Artificial Sequence: Synthetic oligonucleotide
aagucggacagc

SEQ ID NO: 571 - RNA, 13 nt, Artificial Sequence
  Description of Artificial Sequence: Synthetic oligonucleotide
gaaagcgaaaaau

SEQ ID NO: 572 - RNA, 13 nt, Artificial Sequence
  Description of Artificial Sequence: Synthetic oligonucleotide
cccucugauuuag

SEQ ID NO: 573 - RNA, 12 nt, Artificial Sequence
  Description of Artificial Sequence: Synthetic oligonucleotide
ugagcuauuuaa

SEQ ID NO: 574 - RNA, 13 nt, Artificial Sequence
  Description of Artificial Sequence: Synthetic oligonucleotide
aaaaggugaaaaa

SEQ ID NO: 575 - RNA, 14 nt, Artificial Sequence
  Description of Artificial Sequence: Synthetic oligonucleotide
gaaaaagcacuauu

SEQ ID NO: 576 - RNA, 12 nt, Artificial Sequence
  Description of Artificial Sequence: Synthetic oligonucleotide
ggcugaaaagaa

SEQ ID NO: 577 - RNA, 12 nt, Artificial Sequence
  Description of Artificial Sequence: Synthetic oligonucleotide
uaaacccuuaua

SEQ ID NO: 578 - RNA, 13 nt, Artificial Sequence
  Description of Artificial Sequence: Synthetic oligonucleotide
cauacuauuagcc

SEQ ID NO: 579 - RNA, 12 nt, Artificial Sequence
  Description of Artificial Sequence: Synthetic oligonucleotide
gacagaagcauu

SEQ ID NO: 580 - RNA, 14 nt, Artificial Sequence
  Description of Artificial Sequence: Synthetic oligonucleotide
agagcaaauaagau

SEQ ID NO: 581 - RNA, 14 nt, Artificial Sequence
  Description of Artificial Sequence: Synthetic oligonucleotide
ccaacauuuuucuc

SEQ ID NO: 582 - RNA, 15 nt, Artificial Sequence
  Description of Artificial Sequence: Synthetic oligonucleotide
uuaaguaugagaaaa

SEQ ID NO: 583 - RNA, 14 nt, Artificial Sequence
  Description of Artificial Sequence: Synthetic oligonucleotide
caggaauaaagaug

SEQ ID NO: 584 - RNA, 13 nt, Artificial Sequence
  Description of Artificial Sequence: Synthetic oligonucleotide
aauuugaaugacc

SEQ ID NO: 585 - RNA, 14 nt, Artificial Sequence
  Description of Artificial Sequence: Synthetic oligonucleotide
auguauaaagauag

SEQ ID NO: 586 - RNA, 12 nt, Artificial Sequence
  Description of Artificial Sequence: Synthetic oligonucleotide
ggcuguaacuau

SEQ ID NO: 587 - RNA, 11 nt, Artificial Sequence
  Description of Artificial Sequence: Synthetic oligonucleotide
ucugugaagug

SEQ ID NO: 588 - RNA, 14 nt, Artificial Sequence
  Description of Artificial Sequence: Synthetic oligonucleotide
ccuuuaaggaaaug

SEQ ID NO: 589 - RNA, 13 nt, Artificial Sequence
  Description of Artificial Sequence: Synthetic oligonucleotide
aaggauacaaaaa

SEQ ID NO: 590 - RNA, 12 nt, Artificial Sequence
  Description of Artificial Sequence: Synthetic oligonucleotide
agaugcaauuug

SEQ ID NO: 591 - RNA, 12 nt, Artificial Sequence
  Description of Artificial Sequence: Synthetic oligonucleotide
guucaaaacgaa

SEQ ID NO: 592 - RNA, 11 nt, Artificial Sequence
  Description of Artificial Sequence: Synthetic oligonucleotide
gugaaaccuca

SEQ ID NO: 593 - RNA, 13 nt, Artificial Sequence
  Description of Artificial Sequence: Synthetic oligonucleotide
acgaaagagaagc

SEQ ID NO: 594 - RNA, 12 nt, Artificial Sequence
  Description of Artificial Sequence: Synthetic oligonucleotide
cuccacaagcgc

SEQ ID NO: 595 - RNA, 14 nt, Artificial Sequence
  Description of Artificial Sequence: Synthetic oligonucleotide
gagaagauuccaaa

SEQ ID NO: 596 - RNA, 13 nt, Artificial Sequence
  Description of Artificial Sequence: Synthetic oligonucleotide
aaucuggauucaa

SEQ ID NO: 597 - RNA, 13 nt, Artificial Sequence
  Description of Artificial Sequence: Synthetic oligonucleotide
agaacagauuuga

SEQ ID NO: 598 - RNA, 11 nt, Artificial Sequence
  Description of Artificial Sequence: Synthetic oligonucleotide
ccagagcugug

SEQ ID NO: 599 - RNA, 12 nt, Artificial Sequence
  Description of Artificial Sequence: Synthetic oligonucleotide
ccucagauuguu

SEQ ID NO: 600 - RNA, 12 nt, Artificial Sequence
  Description of Artificial Sequence: Synthetic oligonucleotide
cuauuuuaauua

SEQ ID NO: 601 - RNA, 13 nt, Artificial Sequence
  Description of Artificial Sequence: Synthetic oligonucleotide
uuuaauuuauuaa

SEQ ID NO: 602 - RNA, 12 nt, Artificial Sequence
  Description of Artificial Sequence: Synthetic oligonucleotide
augcaguuugaa

SEQ ID NO: 603 - RNA, 11 nt, Artificial Sequence
  Description of Artificial Sequence: Synthetic oligonucleotide
caugcugcugg

SEQ ID NO: 604 - RNA, 13 nt, Artificial Sequence
  Description of Artificial Sequence: Synthetic oligonucleotide
agaugugcauuuc

SEQ ID NO: 605 - RNA, 12 nt, Artificial Sequence
  Description of Artificial Sequence: Synthetic oligonucleotide
ucaaaaccugug

SEQ ID NO: 606 - RNA, 11 nt, Artificial Sequence
  Description of Artificial Sequence: Synthetic oligonucleotide
gaaugugggua

SEQ ID NO: 607 - RNA, 10 nt, Artificial Sequence
  Description of Artificial Sequence: Synthetic oligonucleotide
auguggguag

SEQ ID NO: 608 - RNA, 13 nt, Artificial Sequence
  Description of Artificial Sequence: Synthetic oligonucleotide
ugaaaaugagcau

SEQ ID NO: 609 - RNA, 13 nt, Artificial Sequence
  Description of Artificial Sequence: Synthetic oligonucleotide
uugcuuuucaugu

SEQ ID NO: 610 - RNA, 12 nt, Artificial Sequence
  Description of Artificial Sequence: Synthetic oligonucleotide
uguauuucuaua

SEQ ID NO: 611 - RNA, 13 nt, Artificial Sequence
  Description of Artificial Sequence: Synthetic oligonucleotide
uuugauuaauguu

SEQ ID NO: 612 - RNA, 12 nt, Artificial Sequence
  Description of Artificial Sequence: Synthetic oligonucleotide
caacguguauag

SEQ ID NO: 613 - RNA, 12 nt, Artificial Sequence
  Description of Artificial Sequence: Synthetic oligonucleotide
cauauccuuggc

SEQ ID NO: 614 - RNA, 13 nt, Artificial Sequence
  Description of Artificial Sequence: Synthetic oligonucleotide
uacuaacaucugg

SEQ ID NO: 615 - RNA, 11 nt, Artificial Sequence
  Description of Artificial Sequence: Synthetic oligonucleotide
cauaaguugug

SEQ ID NO: 616 - RNA, 12 nt, Artificial Sequence
  Description of Artificial Sequence: Synthetic oligonucleotide
gcaucauuuugg

SEQ ID NO: 617 - RNA, 10 nt, Artificial Sequence
  Description of Artificial Sequence: Synthetic oligonucleotide
gcucuucuua

SEQ ID NO: 618 - RNA, 10 nt, Artificial Sequence
  Description of Artificial Sequence: Synthetic oligonucleotide
agauuagguc

SEQ ID NO: 619 - RNA, 12 nt, Artificial Sequence
  Description of Artificial Sequence: Synthetic oligonucleotide
auggaauugaaa

SEQ ID NO: 620 - RNA, 13 nt, Artificial Sequence
  Description of Artificial Sequence: Synthetic oligonucleotide
cacacucauuccu

SEQ ID NO: 621 - RNA, 12 nt, Artificial Sequence
  Description of Artificial Sequence: Synthetic oligonucleotide
uguagagguaac

SEQ ID NO: 622 - RNA, 11 nt, Artificial Sequence
  Description of Artificial Sequence: Synthetic oligonucleotide
caaccacaugc

SEQ ID NO: 623 - RNA, 12 nt, Artificial Sequence
  Description of Artificial Sequence: Synthetic oligonucleotide
ucggaaacaagu

SEQ ID NO: 624 - RNA, 11 nt, Artificial Sequence
  Description of Artificial Sequence: Synthetic oligonucleotide
acucccaauaa

SEQ ID NO: 625 - RNA, 13 nt, Artificial Sequence
  Description of Artificial Sequence: Synthetic oligonucleotide
aaugcuaagaaau

SEQ ID NO: 626 - RNA, 11 nt, Artificial Sequence
  Description of Artificial Sequence: Synthetic oligonucleotide
gucuuucucua

SEQ ID NO: 627 - RNA, 11 nt, Artificial Sequence
  Description of Artificial Sequence: Synthetic oligonucleotide
ugaauuucagg

SEQ ID NO: 628 - RNA, 13 nt, Artificial Sequence
  Description of Artificial Sequence: Synthetic oligonucleotide
cgauucccucuca

SEQ ID NO: 629 - RNA, 11 nt, Artificial Sequence
  Description of Artificial Sequence: Synthetic oligonucleotide
aggaaagugaa

SEQ ID NO: 630 - RNA, 12 nt, Artificial Sequence
  Description of Artificial Sequence: Synthetic oligonucleotide
gaggcugcaugc

SEQ ID NO: 631 - RNA, 11 nt, Artificial Sequence
  Description of Artificial Sequence: Synthetic oligonucleotide
ucucugaacag

SEQ ID NO: 632 - RNA, 12 nt, Artificial Sequence
  Description of Artificial Sequence: Synthetic oligonucleotide
aacuuggcugua

SEQ ID NO: 633 - RNA, 12 nt, Artificial Sequence
  Description of Artificial Sequence: Synthetic oligonucleotide
agaagccaaaau

SEQ ID NO: 634 - RNA, 14 nt, Artificial Sequence
  Description of Artificial Sequence: Synthetic oligonucleotide
auuaaaagaagucc

SEQ ID NO: 635 - RNA, 14 nt, Artificial Sequence
  Description of Artificial Sequence: Synthetic oligonucleotide
gaauccggauuauc

SEQ ID NO: 636 - RNA, 12 nt, Artificial Sequence
  Description of Artificial Sequence: Synthetic oligonucleotide
aaugugacauca

SEQ ID NO: 637 - RNA, 13 nt, Artificial Sequence
  Description of Artificial Sequence: Synthetic oligonucleotide
caucaaagcaagu

SEQ ID NO: 638 - RNA, 11 nt, Artificial Sequence
  Description of Artificial Sequence: Synthetic oligonucleotide
agagagagaaa

SEQ ID NO: 639 - RNA, 13 nt, Artificial Sequence
  Description of Artificial Sequence: Synthetic oligonucleotide
ucgcuguaguauu

SEQ ID NO: 640 - RNA, 14 nt, Artificial Sequence
  Description of Artificial Sequence: Synthetic oligonucleotide
cgcuguaguauuua

SEQ ID NO: 641 - RNA, 13 nt, Artificial Sequence
  Description of Artificial Sequence: Synthetic oligonucleotide
auuuaagcccaua

SEQ ID NO: 642 - RNA, 15 nt, Artificial Sequence
  Description of Artificial Sequence: Synthetic oligonucleotide
auuaaaauaaacaug

SEQ ID NO: 643 - RNA, 12 nt, Artificial Sequence
  Description of Artificial Sequence: Synthetic oligonucleotide
cuguucugaucg

SEQ ID NO: 644 - RNA, 16 nt, Artificial Sequence
  Description of Artificial Sequence: Synthetic oligonucleotide
aaauaauuugaacuuu

SEQ ID NO: 645 - RNA, 12 nt, Artificial Sequence
  Description of Artificial Sequence: Synthetic oligonucleotide
ugcgaccuuaau

SEQ ID NO: 646 - RNA, 11 nt, Artificial Sequence
  Description of Artificial Sequence: Synthetic oligonucleotide
cugagaaagcu

SEQ ID NO: 647 - RNA, 13 nt, Artificial Sequence
  Description of Artificial Sequence: Synthetic oligonucleotide
aguaaagaugcua

SEQ ID NO: 648 - RNA, 12 nt, Artificial Sequence
  Description of Artificial Sequence: Synthetic oligonucleotide
cugcuuaauugc

SEQ ID NO: 649 - RNA, 14 nt, Artificial Sequence
  Description of Artificial Sequence: Synthetic oligonucleotide
uaccauaugaauga

SEQ ID NO: 650 - RNA, 12 nt, Artificial Sequence
  Description of Artificial Sequence: Synthetic oligonucleotide
aacuuucuuauc

SEQ ID NO: 651 - RNA, 13 nt, Artificial Sequence
  Description of Artificial Sequence: Synthetic oligonucleotide
ccuugcaugacau

SEQ ID NO: 652 - RNA, 14 nt, Artificial Sequence
  Description of Artificial Sequence: Synthetic oligonucleotide
ugaauuuguauaug

SEQ ID NO: 653 - RNA, 12 nt, Artificial Sequence
  Description of Artificial Sequence: Synthetic oligonucleotide
gaauccuaguag

SEQ ID NO: 654 - RNA, 10 nt, Artificial Sequence
  Description of Artificial Sequence: Synthetic oligonucleotide
gaaagggaag

SEQ ID NO: 655 - RNA, 11 nt, Artificial Sequence
  Description of Artificial Sequence: Synthetic oligonucleotide
uaucggcaugc

SEQ ID NO: 656 - RNA, 12 nt, Artificial Sequence
  Description of Artificial Sequence: Synthetic oligonucleotide
caccucauagua

SEQ ID NO: 657 - RNA, 11 nt, Artificial Sequence
  Description of Artificial Sequence: Synthetic oligonucleotide
ccagaauugcc

SEQ ID NO: 658 - RNA, 11 nt, Artificial Sequence
  Description of Artificial Sequence: Synthetic oligonucleotide
uggugaucugg

SEQ ID NO: 659 - RNA, 12 nt, Artificial Sequence
  Description of Artificial Sequence: Synthetic oligonucleotide
gaucuggguaau

SEQ ID NO: 660 - RNA, 12 nt, Artificial Sequence
  Description of Artificial Sequence: Synthetic oligonucleotide
ggaugugaugaa

SEQ ID NO: 661 - RNA, 12 nt, Artificial Sequence
  Description of Artificial Sequence: Synthetic oligonucleotide
cauuuccacagc

SEQ ID NO: 662 - RNA, 11 nt, Artificial Sequence
  Description of Artificial Sequence: Synthetic oligonucleotide
acagcuacacc

SEQ ID NO: 663 - RNA, 12 nt, Artificial Sequence
  Description of Artificial Sequence: Synthetic oligonucleotide
ugcaguucuuac

SEQ ID NO: 664 - RNA, 12 nt, Artificial Sequence
  Description of Artificial Sequence: Synthetic oligonucleotide
acgagaagaaga

SEQ ID NO: 665 - RNA, 12 nt, Artificial Sequence
  Description of Artificial Sequence: Synthetic oligonucleotide
cgagaagaagau

SEQ ID NO: 666 - RNA, 15 nt, Artificial Sequence
  Description of Artificial Sequence: Synthetic oligonucleotide
aagaagaucauuuac

SEQ ID NO: 667 - RNA, 11 nt, Artificial Sequence
  Description of Artificial Sequence: Synthetic oligonucleotide
agaggaagagg

SEQ ID NO: 668 - RNA, 12 nt, Artificial Sequence
  Description of Artificial Sequence: Synthetic oligonucleotide
gaggaagaggug

SEQ ID NO: 669 - RNA, 13 nt, Artificial Sequence
  Description of Artificial Sequence: Synthetic oligonucleotide
cuacuuugagggc

SEQ ID NO: 670 - RNA, 12 nt, Artificial Sequence
  Description of Artificial Sequence: Synthetic oligonucleotide
agggcaucuccu

SEQ ID NO: 671 - RNA, 10 nt, Artificial Sequence
  Description of Artificial Sequence: Synthetic oligonucleotide
ggagugauau

SEQ ID NO: 672 - RNA, 11 nt, Artificial Sequence
  Description of Artificial Sequence: Synthetic oligonucleotide
gagugauaugg

SEQ ID NO: 673 - RNA, 12 nt, Artificial Sequence
  Description of Artificial Sequence: Synthetic oligonucleotide
ugcaguaaagau

SEQ ID NO: 674 - RNA, 13 nt, Artificial Sequence
  Description of Artificial Sequence: Synthetic oligonucleotide
aguaaagauccua

SEQ ID NO: 675 - RNA, 12 nt, Artificial Sequence
  Description of Artificial Sequence: Synthetic oligonucleotide
ugacaaaggaca

SEQ ID NO: 676 - RNA, 13 nt, Artificial Sequence
  Description of Artificial Sequence: Synthetic oligonucleotide
gcaauugugaccc

SEQ ID NO: 677 - RNA, 12 nt, Artificial Sequence
  Description of Artificial Sequence: Synthetic oligonucleotide
aacaucauccau

SEQ ID NO: 678 - RNA, 12 nt, Artificial Sequence
  Description of Artificial Sequence: Synthetic oligonucleotide
ugaaauccaaca

SEQ ID NO: 679 - RNA, 15 nt, Artificial Sequence
  Description of Artificial Sequence: Synthetic oligonucleotide
aacaauauauuucuc

SEQ ID NO: 680 - RNA, 14 nt, Artificial Sequence
  Description of Artificial Sequence: Synthetic oligonucleotide
aacaguaaagucac

SEQ ID NO: 681 - RNA, 14 nt, Artificial Sequence
  Description of Artificial Sequence: Synthetic oligonucleotide
ugugaagaaaguaa

SEQ ID NO: 682 - RNA, 13 nt, Artificial Sequence
  Description of Artificial Sequence: Synthetic oligonucleotide
cuuccgagccauc

SEQ ID NO: 683 - RNA, 12 nt, Artificial Sequence
  Description of Artificial Sequence: Synthetic oligonucleotide
aauggagguuga

SEQ ID NO: 684 - RNA, 12 nt, Artificial Sequence
  Description of Artificial Sequence: Synthetic oligonucleotide
ggagguugaaua

SEQ ID NO: 685 - RNA, 13 nt, Artificial Sequence
  Description of Artificial Sequence: Synthetic oligonucleotide
auuuugaguuuuc

SEQ ID NO: 686 - RNA, 12 nt, Artificial Sequence
  Description of Artificial Sequence: Synthetic oligonucleotide
uauccuguuugu

SEQ ID NO: 687 - RNA, 11 nt, Artificial Sequence
  Description of Artificial Sequence: Synthetic oligonucleotide
ccuguuuguuc

SEQ ID NO: 688 - RNA, 10 nt, Artificial Sequence
  Description of Artificial Sequence: Synthetic oligonucleotide
cucuacagcc

SEQ ID NO: 689 - RNA, 12 nt, Artificial Sequence
  Description of Artificial Sequence: Synthetic oligonucleotide
ucuuccauagcu

SEQ ID NO: 690 - RNA, 12 nt, Artificial Sequence
  Description of Artificial Sequence: Synthetic oligonucleotide
auaaucuuccug

SEQ ID NO: 691 - RNA, 12 nt, Artificial Sequence
  Description of Artificial Sequence: Synthetic oligonucleotide
uaaucuuccugu

SEQ ID NO: 692 - RNA, 12 nt, Artificial Sequence
  Description of Artificial Sequence: Synthetic oligonucleotide
cuucaugacuug

SEQ ID NO: 693 - RNA, 12 nt, Artificial Sequence
  Description of Artificial Sequence: Synthetic oligonucleotide
aagagggagaga

SEQ ID NO: 694 - RNA, 12 nt, Artificial Sequence
  Description of Artificial Sequence: Synthetic oligonucleotide
cgucuccuacca

SEQ ID NO: 695 - RNA, 12 nt, Artificial Sequence
  Description of Artificial Sequence: Synthetic oligonucleotide
gaucaaucggcc

SEQ ID NO: 696 - RNA, 12 nt, Artificial Sequence
  Description of Artificial Sequence: Synthetic oligonucleotide
ggacgaacaucc

SEQ ID NO: 697 - RNA, 11 nt, Artificial Sequence
  Description of Artificial Sequence: Synthetic oligonucleotide
agggucggaac

SEQ ID NO: 698 - RNA, 10 nt, Artificial Sequence
  Description of Artificial Sequence: Synthetic oligonucleotide
ucggaaccca

SEQ ID NO: 699 - RNA, 11 nt, Artificial Sequence
  Description of Artificial Sequence: Synthetic oligonucleotide
acccaagcuua

SEQ ID NO: 700 - RNA, 14 nt, Artificial Sequence
  Description of Artificial Sequence: Synthetic oligonucleotide
gaacuuuaagcaac

SEQ ID NO: 701 - RNA, 11 nt, Artificial Sequence
  Description of Artificial Sequence: Synthetic oligonucleotide
acuauucagug

SEQ ID NO: 702 - RNA, 11 nt, Artificial Sequence
  Description of Artificial Sequence: Synthetic oligonucleotide
cuauucagugg

SEQ ID NO: 703 - RNA, 13 nt, Artificial Sequence
  Description of Artificial Sequence: Synthetic oligonucleotide
aaacacagauaac

SEQ ID NO: 704 - RNA, 12 nt, Artificial Sequence
  Description of Artificial Sequence: Synthetic oligonucleotide
cuuaagaaaaga

SEQ ID NO: 705 - RNA, 12 nt, Artificial Sequence
  Description of Artificial Sequence: Synthetic oligonucleotide
cugaaggagugu

SEQ ID NO: 706 - RNA, 10 nt, Artificial Sequence
  Description of Artificial Sequence: Synthetic oligonucleotide
ucaccgcggg

SEQ ID NO: 707 - RNA, 14 nt, Artificial Sequence
  Description of Artificial Sequence: Synthetic oligonucleotide
agcagaaauaagcg

SEQ ID NO: 708 - RNA, 12 nt, Artificial Sequence
  Description of Artificial Sequence: Synthetic oligonucleotide
aagcgugccguu

SEQ ID NO: 709 - RNA, 12 nt, Artificial Sequence
  Description of Artificial Sequence: Synthetic oligonucleotide
agaaacagucac

SEQ ID NO: 710 - RNA, 12 nt, Artificial Sequence
  Description of Artificial Sequence: Synthetic oligonucleotide
agaggaagaagg

SEQ ID NO: 711 - RNA, 14 nt, Artificial Sequence
  Description of Artificial Sequence: Synthetic oligonucleotide
uguauucaaaauau

SEQ ID NO: 712 - RNA, 13 nt, Artificial Sequence
  Description of Artificial Sequence: Synthetic oligonucleotide
auuuuccucccuu

SEQ ID NO: 713 - RNA, 13 nt, Artificial Sequence
  Description of Artificial Sequence: Synthetic oligonucleotide
caaagaaagauag

SEQ ID NO: 714 - RNA, 12 nt, Artificial Sequence
  Description of Artificial Sequence: Synthetic oligonucleotide
aagaaagauaga

SEQ ID NO: 715 - RNA, 13 nt, Artificial Sequence
  Description of Artificial Sequence: Synthetic oligonucleotide
gaaagcauuuguu

SEQ ID NO: 716 - RNA, 13 nt, Artificial Sequence
  Description of Artificial Sequence: Synthetic oligonucleotide
ugaguuaaacgaa

SEQ ID NO: 717 - RNA, 12 nt, Artificial Sequence
  Description of Artificial Sequence: Synthetic oligonucleotide
acugauacagaa

SEQ ID NO: 718 - RNA, 12 nt, Artificial Sequence
  Description of Artificial Sequence: Synthetic oligonucleotide
auauuauauaua

SEQ ID NO: 719 - RNA, 12 nt, Artificial Sequence
  Description of Artificial Sequence: Synthetic oligonucleotide
auuauauauaua

SEQ ID NO: 720 - RNA, 12 nt, Artificial Sequence
  Description of Artificial Sequence: Synthetic oligonucleotide
ucacuggaugua

SEQ ID NO: 721 - RNA, 12 nt, Artificial Sequence
  Description of Artificial Sequence: Synthetic oligonucleotide
cagggaagagga

SEQ ID NO: 722 - RNA, 15 nt, Artificial Sequence
  Description of Artificial Sequence: Synthetic oligonucleotide
augaucuuuuuuuug

SEQ ID NO: 723 - RNA, 11 nt, Artificial Sequence
  Description of Artificial Sequence: Synthetic oligonucleotide
aguucacggcc

SEQ ID NO: 724 - RNA, 13 nt, Artificial Sequence
  Description of Artificial Sequence: Synthetic oligonucleotide
caccaucacacca

SEQ ID NO: 725 - RNA, 11 nt, Artificial Sequence
  Description of Artificial Sequence: Synthetic oligonucleotide
ccugcggguuu

SEQ ID NO: 726 - RNA, 10 nt, Artificial Sequence
  Description of Artificial Sequence: Synthetic oligonucleotide
auccaguuug

SEQ ID NO: 727 - RNA, 13 nt, Artificial Sequence
  Description of Artificial Sequence: Synthetic oligonucleotide
guuaaggacuucu

SEQ ID NO: 728 - RNA, 13 nt, Artificial Sequence
  Description of Artificial Sequence: Synthetic oligonucleotide
cagugggacagag

SEQ ID NO: 729 - RNA, 14 nt, Artificial Sequence
  Description of Artificial Sequence: Synthetic oligonucleotide
aauuuguuauugug

SEQ ID NO: 730 - RNA, 13 nt, Artificial Sequence
  Description of Artificial Sequence: Synthetic oligonucleotide
uucaaaugcauuu

SEQ ID NO: 731 - RNA, 10 nt, Artificial Sequence
  Description of Artificial Sequence: Synthetic oligonucleotide
caggaaagcc

SEQ ID NO: 732 - RNA, 11 nt, Artificial Sequence
  Description of Artificial Sequence: Synthetic oligonucleotide
aggaaagcccu

SEQ ID NO: 733 - RNA, 12 nt, Artificial Sequence
  Description of Artificial Sequence: Synthetic oligonucleotide
cccagcauggcc

SEQ ID NO: 734 - RNA, 11 nt, Artificial Sequence
  Description of Artificial Sequence: Synthetic oligonucleotide
cuucucccuga

SEQ ID NO: 735 - RNA, 12 nt, Artificial Sequence
  Description of Artificial Sequence: Synthetic oligonucleotide
gaagaagcccuu

SEQ ID NO: 736 - RNA, 12 nt, Artificial Sequence
  Description of Artificial Sequence: Synthetic oligonucleotide
agaagcccuuca

SEQ ID NO: 737 - RNA, 11 nt, Artificial Sequence
  Description of Artificial Sequence: Synthetic oligonucleotide
gcccuucagcg

SEQ ID NO: 738 - RNA, 11 nt, Artificial Sequence
  Description of Artificial Sequence: Synthetic oligonucleotide
ccuucagcggc

SEQ ID NO: 739 - RNA, 12 nt, Artificial Sequence
  Description of Artificial Sequence: Synthetic oligonucleotide
ucagcggccagu

SEQ ID NO: 740 - RNA, 12 nt, Artificial Sequence
  Description of Artificial Sequence: Synthetic oligonucleotide
ugaaaagcuccg

SEQ ID NO: 741 - RNA, 11 nt, Artificial Sequence
  Description of Artificial Sequence: Synthetic oligonucleotide
aaaagcuccgg

SEQ ID NO: 742 - RNA, 13 nt, Artificial Sequence
  Description of Artificial Sequence: Synthetic oligonucleotide
agucaacagucug

SEQ ID NO: 743 - RNA, 13 nt, Artificial Sequence
  Description of Artificial Sequence: Synthetic oligonucleotide
cagaguucaaaag

SEQ ID NO: 744 - RNA, 13 nt, Artificial Sequence
  Description of Artificial Sequence: Synthetic oligonucleotide
agaguucaaaagc

SEQ ID NO: 745 - RNA, 12 nt, Artificial Sequence
  Description of Artificial Sequence: Synthetic oligonucleotide
uucaaaagcccu

SEQ ID NO: 746 - RNA, 12 nt, Artificial Sequence
  Description of Artificial Sequence: Synthetic oligonucleotide
ucaaaagcccuu

SEQ ID NO: 747 - RNA, 12 nt, Artificial Sequence
  Description of Artificial Sequence: Synthetic oligonucleotide
aaaagcccuuca

SEQ ID NO: 748 - RNA, 12 nt, Artificial Sequence
  Description of Artificial Sequence: Synthetic oligonucleotide
aaagcccuucag

SEQ ID NO: 749 - RNA, 13 nt, Artificial Sequence
  Description of Artificial Sequence: Synthetic oligonucleotide
gugaagccgcucg

SEQ ID NO: 750 - RNA, 12 nt, Artificial Sequence
  Description of Artificial Sequence: Synthetic oligonucleotide
cacgccagucaa

SEQ ID NO: 751 - RNA, 13 nt, Artificial Sequence
  Description of Artificial Sequence: Synthetic oligonucleotide
uucuuggugcgug

SEQ ID NO: 752 - RNA, 14 nt, Artificial Sequence
  Description of Artificial Sequence: Synthetic oligonucleotide
auuggauucaucag

SEQ ID NO: 753 - RNA, 13 nt, Artificial Sequence
  Description of Artificial Sequence: Synthetic oligonucleotide
uggaauaccuaag

SEQ ID NO: 754 - RNA, 12 nt, Artificial Sequence
  Description of Artificial Sequence: Synthetic oligonucleotide
auuugaggcuca

SEQ ID NO: 755 - RNA, 11 nt, Artificial Sequence
  Description of Artificial Sequence: Synthetic oligonucleotide
ucuacaauugg

SEQ ID NO: 756 - RNA, 12 nt, Artificial Sequence
  Description of Artificial Sequence: Synthetic oligonucleotide
uaguuaggagcc

SEQ ID NO: 757 - RNA, 13 nt, Artificial Sequence
  Description of Artificial Sequence: Synthetic oligonucleotide
agucaauauccac

SEQ ID NO: 758 - RNA, 13 nt, Artificial Sequence
  Description of Artificial Sequence: Synthetic oligonucleotide
auguucagucaca

SEQ ID NO: 759 - RNA, 12 nt, Artificial Sequence
  Description of Artificial Sequence: Synthetic oligonucleotide
acacacacauac

SEQ ID NO: 760 - RNA, 12 nt, Artificial Sequence
  Description of Artificial Sequence: Synthetic oligonucleotide
uuccuuuugcuu

SEQ ID NO: 761 - RNA, 16 nt, Artificial Sequence
  Description of Artificial Sequence: Synthetic oligonucleotide
uuuuaaaguaauuuuu

SEQ ID NO: 762 - RNA, 13 nt, Artificial Sequence
  Description of Artificial Sequence: Synthetic oligonucleotide
caacagucaaugg

SEQ ID NO: 763 - RNA, 13 nt, Artificial Sequence
  Description of Artificial Sequence: Synthetic oligonucleotide
ucgacaaaccaau

SEQ ID NO: 764 - RNA, 12 nt, Artificial Sequence
  Description of Artificial Sequence: Synthetic oligonucleotide
acugcuaccacu

SEQ ID NO: 765 - RNA, 13 nt, Artificial Sequence
  Description of Artificial Sequence: Synthetic oligonucleotide
gcaagcggucuua

SEQ ID NO: 766 - RNA, 13 nt, Artificial Sequence
  Description of Artificial Sequence: Synthetic oligonucleotide
ggucuuaccggcu

SEQ ID NO: 767 - RNA, 11 nt, Artificial Sequence
  Description of Artificial Sequence: Synthetic oligonucleotide
gauggguuacc

SEQ ID NO: 768 - RNA, 11 nt, Artificial Sequence
  Description of Artificial Sequence: Synthetic oligonucleotide
guuaccugcga

SEQ ID NO: 769 - RNA, 12 nt, Artificial Sequence
  Description of Artificial Sequence: Synthetic oligonucleotide
aaucuugcugag

SEQ ID NO: 770 - RNA, 13 nt, Artificial Sequence
  Description of Artificial Sequence: Synthetic oligonucleotide
agcauaaaacagu

SEQ ID NO: 771 - RNA, 12 nt, Artificial Sequence
  Description of Artificial Sequence: Synthetic oligonucleotide
guccuuuauccu

SEQ ID NO: 772 - RNA, 12 nt, Artificial Sequence
  Description of Artificial Sequence: Synthetic oligonucleotide
caacgcaaguug

SEQ ID NO: 773 - RNA, 13 nt, Artificial Sequence
  Description of Artificial Sequence: Synthetic oligonucleotide
aaacugaaaccau

SEQ ID NO: 774 - RNA, 14 nt, Artificial Sequence
  Description of Artificial Sequence: Synthetic oligonucleotide
acuuuguuaaauau

SEQ ID NO: 775 - RNA, 14 nt, Artificial Sequence
  Description of Artificial Sequence: Synthetic oligonucleotide
guauauuaaaaguu

SEQ ID NO: 776 - RNA, 13 nt, Artificial Sequence
  Description of Artificial Sequence: Synthetic oligonucleotide
guuuugacuuaac

SEQ ID NO: 777 - RNA, 13 nt, Artificial Sequence
  Description of Artificial Sequence: Synthetic oligonucleotide
gcaaacucagcac

SEQ ID NO: 778 - RNA, 11 nt, Artificial Sequence
  Description of Artificial Sequence: Synthetic oligonucleotide
ugcugaccuca

SEQ ID NO: 779 - RNA, 14 nt, Artificial Sequence
  Description of Artificial Sequence: Synthetic oligonucleotide
uuuauucagaucgc

SEQ ID NO: 780 - RNA, 13 nt, Artificial Sequence
  Description of Artificial Sequence: Synthetic oligonucleotide
aggguucugggau

SEQ ID NO: 781 - RNA, 15 nt, Artificial Sequence
  Description of Artificial Sequence: Synthetic oligonucleotide
auauuggaaauuaug

SEQ ID NO: 782 - RNA, 13 nt, Artificial Sequence
  Description of Artificial Sequence: Synthetic oligonucleotide
auggaagcacuag

SEQ ID NO: 783 - RNA, 13 nt, Artificial Sequence
  Description of Artificial Sequence: Synthetic oligonucleotide
guuuuuaugugga

SEQ ID NO: 784 - RNA, 12 nt, Artificial Sequence
  Description of Artificial Sequence: Synthetic oligonucleotide
ggaauugguaga

SEQ ID NO: 785 - RNA, 13 nt, Artificial Sequence
  Description of Artificial Sequence: Synthetic oligonucleotide
uuagacuuggaga

SEQ ID NO: 786 - RNA, 13 nt, Artificial Sequence
  Description of Artificial Sequence: Synthetic oligonucleotide
uuacaguauucca

SEQ ID NO: 787 - RNA, 15 nt, Artificial Sequence
  Description of Artificial Sequence: Synthetic oligonucleotide
ccacugaugaauuaa

SEQ ID NO: 788 - RNA, 12 nt, Artificial Sequence
  Description of Artificial Sequence: Synthetic oligonucleotide
ccacaucaucac

SEQ ID NO: 789 - RNA, 13 nt, Artificial Sequence
  Description of Artificial Sequence: Synthetic oligonucleotide
cucaccaaacaga

SEQ ID NO: 790 - RNA, 12 nt, Artificial Sequence
  Description of Artificial Sequence: Synthetic oligonucleotide
ggaacaugaugg

SEQ ID NO: 791 - RNA, 12 nt, Artificial Sequence
  Description of Artificial Sequence: Synthetic oligonucleotide
cauguagacugc

SEQ ID NO: 792 - RNA, 13 nt, Artificial Sequence
  Description of Artificial Sequence: Synthetic oligonucleotide
ggaucuauuuaug

SEQ ID NO: 793 - RNA, 12 nt, Artificial Sequence
  Description of Artificial Sequence: Synthetic oligonucleotide
gcacuauuauca

SEQ ID NO: 794 - RNA, 11 nt, Artificial Sequence
  Description of Artificial Sequence: Synthetic oligonucleotide
aucaguucugc

SEQ ID NO: 795 - RNA, 13 nt, Artificial Sequence
  Description of Artificial Sequence: Synthetic oligonucleotide
agauuaaaccuac

SEQ ID NO: 796 - RNA, 13 nt, Artificial Sequence
  Description of Artificial Sequence: Synthetic oligonucleotide
auaaaauccuucu

SEQ ID NO: 797 - RNA, 12 nt, Artificial Sequence
  Description of Artificial Sequence: Synthetic oligonucleotide
aaugcuguagac

SEQ ID NO: 798 - RNA, 13 nt, Artificial Sequence
  Description of Artificial Sequence: Synthetic oligonucleotide
uugauaggaauag

SEQ ID NO: 799 - RNA, 11 nt, Artificial Sequence
  Description of Artificial Sequence: Synthetic oligonucleotide
aauggcccuga

SEQ ID NO: 800 - RNA, 11 nt, Artificial Sequence
  Description of Artificial Sequence: Synthetic oligonucleotide
uuccucaagca

SEQ ID NO: 801 - RNA, 10 nt, Artificial Sequence
  Description of Artificial Sequence: Synthetic oligonucleotide
guucagccca

SEQ ID NO: 802 - RNA, 11 nt, Artificial Sequence
  Description of Artificial Sequence: Synthetic oligonucleotide
gcugcugaacc

SEQ ID NO: 803 - RNA, 12 nt, Artificial Sequence
  Description of Artificial Sequence: Synthetic oligonucleotide
aaguucucuuca

SEQ ID NO: 804 - RNA, 11 nt, Artificial Sequence
  Description of Artificial Sequence: Synthetic oligonucleotide
ccagccuagag

SEQ ID NO: 805 - RNA, 13 nt, Artificial Sequence
  Description of Artificial Sequence: Synthetic oligonucleotide
cucugugaagugu

SEQ ID NO: 806 - RNA, 14 nt, Artificial Sequence
  Description of Artificial Sequence: Synthetic oligonucleotide
ugagaaaauuucaa

SEQ ID NO: 807 - RNA, 11 nt, Artificial Sequence
  Description of Artificial Sequence: Synthetic oligonucleotide
aauccuccuga

SEQ ID NO: 808 - RNA, 12 nt, Artificial Sequence
  Description of Artificial Sequence: Synthetic oligonucleotide
gugacaucauau

SEQ ID NO: 809 - RNA, 13 nt, Artificial Sequence
  Description of Artificial Sequence: Synthetic oligonucleotide
aaucuucaucaua

SEQ ID NO: 810 - RNA, 13 nt, Artificial Sequence
  Description of Artificial Sequence: Synthetic oligonucleotide
gacuagcuauuaa

SEQ ID NO: 811 - RNA, 14 nt, Artificial Sequence
  Description of Artificial Sequence: Synthetic oligonucleotide
ucucuacuaaaaau

SEQ ID NO: 812 - RNA, 12 nt, Artificial Sequence
  Description of Artificial Sequence: Synthetic oligonucleotide
ucuaucucgccu

SEQ ID NO: 813 - RNA, 13 nt, Artificial Sequence
  Description of Artificial Sequence: Synthetic oligonucleotide
cuucgguccaguu

SEQ ID NO: 814 - RNA, 11 nt, Artificial Sequence
  Description of Artificial Sequence: Synthetic oligonucleotide
gauguagccgc

SEQ ID NO: 815 - RNA, 12 nt, Artificial Sequence
  Description of Artificial Sequence: Synthetic oligonucleotide
ugaggagacuug

SEQ ID NO: 816 - RNA, 12 nt, Artificial Sequence
  Description of Artificial Sequence: Synthetic oligonucleotide
gaguagugagga

SEQ ID NO: 817 - RNA, 14 nt, Artificial Sequence
  Description of Artificial Sequence: Synthetic oligonucleotide
cagaugaguacaaa

SEQ ID NO: 818 - RNA, 13 nt, Artificial Sequence
  Description of Artificial Sequence: Synthetic oligonucleotide
guuguuaaugggc

SEQ ID NO: 819 - RNA, 13 nt, Artificial Sequence
  Description of Artificial Sequence: Synthetic oligonucleotide
uuuuuaauuuauu

SEQ ID NO: 820 - RNA, 12 nt, Artificial Sequence
  Description of Artificial Sequence: Synthetic oligonucleotide
uauuuaaauaug

SEQ ID NO: 821 - RNA, 13 nt, Artificial Sequence
  Description of Artificial Sequence: Synthetic oligonucleotide
uauccuuuguuuc

SEQ ID NO: 822 - RNA, 14 nt, Artificial Sequence
  Description of Artificial Sequence: Synthetic oligonucleotide
cgucuaaguguuug

SEQ ID NO: 823 - RNA, 12 nt, Artificial Sequence
  Description of Artificial Sequence: Synthetic oligonucleotide
accugugacaaa

SEQ ID NO: 824 - RNA, 13 nt, Artificial Sequence
  Description of Artificial Sequence: Synthetic oligonucleotide
ccaggcugaauua

SEQ ID NO: 825 - RNA, 14 nt, Artificial Sequence
  Description of Artificial Sequence: Synthetic oligonucleotide
gucauucuuacaau

SEQ ID NO: 826 - RNA, 15 nt, Artificial Sequence
  Description of Artificial Sequence: Synthetic oligonucleotide
ucauucuuacaauug

SEQ ID NO: 827 - RNA, 12 nt, Artificial Sequence
  Description of Artificial Sequence: Synthetic oligonucleotide
cagagaguguac

SEQ ID NO: 828 - RNA, 12 nt, Artificial Sequence
  Description of Artificial Sequence: Synthetic oligonucleotide
agaacucagcag

SEQ ID NO: 829 - RNA, 13 nt, Artificial Sequence
  Description of Artificial Sequence: Synthetic oligonucleotide
uuuauuuucagua

SEQ ID NO: 830 - RNA, 12 nt, Artificial Sequence
  Description of Artificial Sequence: Synthetic oligonucleotide
ucuuaaauggaa

SEQ ID NO: 831 - RNA, 13 nt, Artificial Sequence
  Description of Artificial Sequence: Synthetic oligonucleotide
ugccuaaaauugu

SEQ ID NO: 832 - RNA, 12 nt, Artificial Sequence
  Description of Artificial Sequence: Synthetic oligonucleotide
agacugugagcu

SEQ ID NO: 833 - RNA, 14 nt, Artificial Sequence
  Description of Artificial Sequence: Synthetic oligonucleotide
ugcuuuuuauuaau

SEQ ID NO: 834 - RNA, 13 nt, Artificial Sequence
  Description of Artificial Sequence: Synthetic oligonucleotide
cucuucuuacauu

SEQ ID NO: 835 - RNA, 15 nt, Artificial Sequence
  Description of Artificial Sequence: Synthetic oligonucleotide
cauuuguaaaaaugu

SEQ ID NO: 836 - RNA, 15 nt, Artificial Sequence
  Description of Artificial Sequence: Synthetic oligonucleotide
aucuuaauucauauu

SEQ ID NO: 837 - RNA, 13 nt, Artificial Sequence
  Description of Artificial Sequence: Synthetic oligonucleotide
gaacuaaucauga

SEQ ID NO: 838 - RNA, 12 nt, Artificial Sequence
  Description of Artificial Sequence: Synthetic oligonucleotide
ucugcucuuggg

SEQ ID NO: 839 - RNA, 13 nt, Artificial Sequence
  Description of Artificial Sequence: Synthetic oligonucleotide
caguagcuuugag

SEQ ID NO: 840 - RNA, 14 nt, Artificial Sequence
  Description of Artificial Sequence: Synthetic oligonucleotide
cacguaauauuuca

SEQ ID NO: 841 - RNA, 13 nt, Artificial Sequence
  Description of Artificial Sequence: Synthetic oligonucleotide
uauucucuucacu

SEQ ID NO: 842 - RNA, 14 nt, Artificial Sequence
  Description of Artificial Sequence: Synthetic oligonucleotide
cuaaugcuaagaaa

SEQ ID NO: 843 - RNA, 12 nt, Artificial Sequence
  Description of Artificial Sequence: Synthetic oligonucleotide
gcugaaaaucaa

SEQ ID NO: 844 - RNA, 14 nt, Artificial Sequence
  Description of Artificial Sequence: Synthetic oligonucleotide
aauaugauuacuuu

SEQ ID NO: 845 - RNA, 14 nt, Artificial Sequence
  Description of Artificial Sequence: Synthetic oligonucleotide
cauuuuguucuaca

SEQ ID NO: 846 - RNA, 12 nt, Artificial Sequence
  Description of Artificial Sequence: Synthetic oligonucleotide
cccgggacucuc

SEQ ID NO: 847 - RNA, 14 nt, Artificial Sequence
  Description of Artificial Sequence: Synthetic oligonucleotide
ccuuuaaaguaaag

SEQ ID NO: 848 - RNA, 13 nt, Artificial Sequence
  Description of Artificial Sequence: Synthetic oligonucleotide
ucuggaagccugg

SEQ ID NO: 849 - RNA, 14 nt, Artificial Sequence
  Description of Artificial Sequence: Synthetic oligonucleotide
aaaacaaaagagag

SEQ ID NO: 850 - RNA, 13 nt, Artificial Sequence
  Description of Artificial Sequence: Synthetic oligonucleotide
aucaguuaugccg

SEQ ID NO: 851 - RNA, 13 nt, Artificial Sequence
  Description of Artificial Sequence: Synthetic oligonucleotide
uaaaagaagucca

SEQ ID NO: 852 - RNA, 11 nt, Artificial Sequence
  Description of Artificial Sequence: Synthetic oligonucleotide
aggugagguua

SEQ ID NO: 853 - RNA, 11 nt, Artificial Sequence
  Description of Artificial Sequence: Synthetic oligonucleotide
gggaagaggac

SEQ ID NO: 854 - RNA, 13 nt, Artificial Sequence
  Description of Artificial Sequence: Synthetic oligonucleotide
aagcaaguauugu

SEQ ID NO: 855 - RNA, 12 nt, Artificial Sequence
  Description of Artificial Sequence: Synthetic oligonucleotide
auuguagcacuc

SEQ ID NO: 856 - RNA, 14 nt, Artificial Sequence
  Description of Artificial Sequence: Synthetic oligonucleotide
acaaaaccacaaau

SEQ ID NO: 857 - RNA, 12 nt, Artificial Sequence
  Description of Artificial Sequence: Synthetic oligonucleotide
uaagcccauaca

SEQ ID NO: 858 - RNA, 11 nt, Artificial Sequence
  Description of Artificial Sequence: Synthetic oligonucleotide
agcccauacag

SEQ ID NO: 859 - RNA, 12 nt, Artificial Sequence
  Description of Artificial Sequence: Synthetic oligonucleotide
cagaaaccuucc

SEQ ID NO: 860 - RNA, 10 nt, Artificial Sequence
  Description of Artificial Sequence: Synthetic oligonucleotide
guauaccuac

SEQ ID NO: 861 - RNA, 13 nt, Artificial Sequence
  Description of Artificial Sequence: Synthetic oligonucleotide
gccaguuuucgga

SEQ ID NO: 862 - RNA, 9 nt, Artificial Sequence
  Description of Artificial Sequence: Synthetic oligonucleotide
ggaacaggg

SEQ ID NO: 863 - RNA, 13 nt, Artificial Sequence
  Description of Artificial Sequence: Synthetic oligonucleotide
uuaacuuuccagu

SEQ ID NO: 864 - RNA, 14 nt, Artificial Sequence
  Description of Artificial Sequence: Synthetic oligonucleotide
aaaguuugguuuug

SEQ ID NO: 865 - RNA, 12 nt, Artificial Sequence
  Description of Artificial Sequence: Synthetic oligonucleotide
cuucccacugua

SEQ ID NO: 866 - RNA, 13 nt, Artificial Sequence
  Description of Artificial Sequence: Synthetic oligonucleotide
ugauaccauauga

SEQ ID NO: 867 - RNA, 11 nt, Artificial Sequence
  Description of Artificial Sequence: Synthetic oligonucleotide
aacaugggcug

SEQ ID NO: 868 - RNA, 13 nt, Artificial Sequence
  Description of Artificial Sequence: Synthetic oligonucleotide
caacuuuuucaua

SEQ ID NO: 869 - RNA, 12 nt, Artificial Sequence
  Description of Artificial Sequence: Synthetic oligonucleotide
caugaggccgga

SEQ ID NO: 870 - RNA, 11 nt, Artificial Sequence
  Description of Artificial Sequence: Synthetic oligonucleotide
acugcauuugu

SEQ ID NO: 871 - RNA, 13 nt, Artificial Sequence
  Description of Artificial Sequence: Synthetic oligonucleotide
aauguuuacuacc

SEQ ID NO: 872 - RNA, 15 nt, Artificial Sequence
  Description of Artificial Sequence: Synthetic oligonucleotide
aauuuuuugaugaaa

SEQ ID NO: 873 - RNA, 14 nt, Artificial Sequence
  Description of Artificial Sequence: Synthetic oligonucleotide
cagugugugaauuu

SEQ ID NO: 874 - RNA, 13 nt, Artificial Sequence
  Description of Artificial Sequence: Synthetic oligonucleotide
gagcaauguaugu

SEQ ID NO: 875 - RNA, 14 nt, Artificial Sequence
  Description of Artificial Sequence: Synthetic oligonucleotide
aaagcacauauaua

SEQ ID NO: 876 - RNA, 14 nt, Artificial Sequence
  Description of Artificial Sequence: Synthetic oligonucleotide
guaauaguuucucc

SEQ ID NO: 877 - RNA, 13 nt, Artificial Sequence
  Description of Artificial Sequence: Synthetic oligonucleotide
aguuucuccaaau

SEQ ID NO: 878 - RNA, 13 nt, Artificial Sequence
  Description of Artificial Sequence: Synthetic oligonucleotide
uacuuccuagaaa

SEQ ID NO: 879 - RNA, 13 nt, Artificial Sequence
  Description of Artificial Sequence: Synthetic oligonucleotide
uacaccauauaug

SEQ ID NO: 880 - RNA, 14 nt, Artificial Sequence
  Description of Artificial Sequence: Synthetic oligonucleotide
auauaugaauggag

SEQ ID NO: 881 - RNA, 13 nt, Artificial Sequence
  Description of Artificial Sequence: Synthetic oligonucleotide
acgagaagaagau

SEQ ID NO: 882 - RNA, 13 nt, Artificial Sequence
  Description of Artificial Sequence: Synthetic oligonucleotide
ucauuuacaggga

SEQ ID NO: 883 - RNA, 13 nt, Artificial Sequence
  Description of Artificial Sequence: Synthetic oligonucleotide
cauuuacagggac

SEQ ID NO: 884 - RNA, 10 nt, Artificial Sequence
  Description of Artificial Sequence: Synthetic oligonucleotide
agggaccuga

SEQ ID NO: 885 - RNA, 14 nt, Artificial Sequence
  Description of Artificial Sequence: Synthetic oligonucleotide
uguuugacugcauc

SEQ ID NO: 886 - RNA, 13 nt, Artificial Sequence
  Description of Artificial Sequence: Synthetic oligonucleotide
uuugacugcaucg

SEQ ID NO: 887 - RNA, 12 nt, Artificial Sequence
  Description of Artificial Sequence: Synthetic oligonucleotide
gaguucacaggg

SEQ ID NO: 888 - RNA, 13 nt, Artificial Sequence
  Description of Artificial Sequence: Synthetic oligonucleotide
ggcaccucugucc

SEQ ID NO: 889 - RNA, 15 nt, Artificial Sequence
  Description of Artificial Sequence: Synthetic oligonucleotide
gguuugucuuuuuaa

SEQ ID NO: 890 - RNA, 14 nt, Artificial Sequence
  Description of Artificial Sequence: Synthetic oligonucleotide
uuugucuuuuuaag

SEQ ID NO: 891 - RNA, 13 nt, Artificial Sequence
  Description of Artificial Sequence: Synthetic oligonucleotide
ccuaaagguuguc

SEQ ID NO: 892 - RNA, 12 nt, Artificial Sequence
  Description of Artificial Sequence: Synthetic oligonucleotide
aagguugucgac

SEQ ID NO: 893 - RNA, 13 nt, Artificial Sequence
  Description of Artificial Sequence: Synthetic oligonucleotide
accuggcaauugu

SEQ ID NO: 894 - RNA, 12 nt, Artificial Sequence
  Description of Artificial Sequence: Synthetic oligonucleotide
aguggugcgagg

SEQ ID NO: 895 - RNA, 13 nt, Artificial Sequence
  Description of Artificial Sequence: Synthetic oligonucleotide
agagacaugaaau

SEQ ID NO: 896 - RNA, 13 nt, Artificial Sequence
  Description of Artificial Sequence: Synthetic oligonucleotide
auauauuucucca

SEQ ID NO: 897 - RNA, 10 nt, Artificial Sequence
  Description of Artificial Sequence: Synthetic oligonucleotide
caugaaggcu

SEQ ID NO: 898 - RNA, 11 nt, Artificial Sequence
  Description of Artificial Sequence: Synthetic oligonucleotide
gcuggaguggu

SEQ ID NO: 899 - RNA, 11 nt, Artificial Sequence
  Description of Artificial Sequence: Synthetic oligonucleotide
aggaagagagg

SEQ ID NO: 900 - RNA, 12 nt, Artificial Sequence
  Description of Artificial Sequence: Synthetic oligonucleotide
cuugcaucgggc

SEQ ID NO: 901 - RNA, 13 nt, Artificial Sequence
  Description of Artificial Sequence: Synthetic oligonucleotide
auauccuacugug

SEQ ID NO: 902 - RNA, 13 nt, Artificial Sequence
  Description of Artificial Sequence: Synthetic oligonucleotide
uccuacuguguaa

SEQ ID NO: 903 - RNA, 12 nt, Artificial Sequence
  Description of Artificial Sequence: Synthetic oligonucleotide
ccuuguagugua

SEQ ID NO: 904 - RNA, 13 nt, Artificial Sequence
  Description of Artificial Sequence: Synthetic oligonucleotide
ucuuuguugauug

SEQ ID NO: 905 - RNA, 14 nt, Artificial Sequence
  Description of Artificial Sequence: Synthetic oligonucleotide
uuuguugauugaaa

SEQ ID NO: 906 - RNA, 15 nt, Artificial Sequence
  Description of Artificial Sequence: Synthetic oligonucleotide
uucuuuuucuuccau

SEQ ID NO: 907 - RNA, 13 nt, Artificial Sequence
  Description of Artificial Sequence: Synthetic oligonucleotide
aaucuuccuucua

SEQ ID NO: 908 - RNA, 13 nt, Artificial Sequence
  Description of Artificial Sequence: Synthetic oligonucleotide
uugaaugcuucau

SEQ ID NO: 909 - RNA, 13 nt, Artificial Sequence
  Description of Artificial Sequence: Synthetic oligonucleotide
ugaaugcuucaug

SEQ ID NO: 910 - RNA, 13 nt, Artificial Sequence
  Description of Artificial Sequence: Synthetic oligonucleotide
aauucuacuuuga

SEQ ID NO: 911 - RNA, 13 nt, Artificial Sequence
  Description of Artificial Sequence: Synthetic oligonucleotide
agcaacuacagac

SEQ ID NO: 912 - RNA, 13 nt, Artificial Sequence
  Description of Artificial Sequence: Synthetic oligonucleotide
gaccaaggucaac

SEQ ID NO: 913 - RNA, 13 nt, Artificial Sequence
  Description of Artificial Sequence: Synthetic oligonucleotide
cgacuaucucgac

SEQ ID NO: 914 - RNA, 13 nt, Artificial Sequence
  Description of Artificial Sequence: Synthetic oligonucleotide
aaccuucccaaac

SEQ ID NO: 915 - RNA, 14 nt, Artificial Sequence
  Description of Artificial Sequence: Synthetic oligonucleotide
ccaagcuuagaacu

SEQ ID NO: 916 - RNA, 15 nt, Artificial Sequence
  Description of Artificial Sequence: Synthetic oligonucleotide
agcuuagaacuuuaa

SEQ ID NO: 917 - RNA, 11 nt, Artificial Sequence
  Description of Artificial Sequence: Synthetic oligonucleotide
aagaccaccac

SEQ ID NO: 918 - RNA, 14 nt, Artificial Sequence
  Description of Artificial Sequence: Synthetic oligonucleotide
gcgagaaauaaagu

SEQ ID NO: 919 - RNA, 14 nt, Artificial Sequence
  Description of Artificial Sequence: Synthetic oligonucleotide
cgagaaauaaaguu

SEQ ID NO: 920 - RNA, 12 nt, Artificial Sequence
  Description of Artificial Sequence: Synthetic oligonucleotide
aggaaaugaucc

SEQ ID NO: 921 - RNA, 13 nt, Artificial Sequence
  Description of Artificial Sequence: Synthetic oligonucleotide
gaagaaaugaaac

SEQ ID NO: 922 - RNA, 13 nt, Artificial Sequence
  Description of Artificial Sequence: Synthetic oligonucleotide
guuuccauccucc

SEQ ID NO: 923 - RNA, 15 nt, Artificial Sequence
  Description of Artificial Sequence: Synthetic oligonucleotide
acugaaaaucuuuga

SEQ ID NO: 924 - RNA, 11 nt, Artificial Sequence
  Description of Artificial Sequence: Synthetic oligonucleotide
ugccguucagg

SEQ ID NO: 925 - RNA, 13 nt, Artificial Sequence
  Description of Artificial Sequence: Synthetic oligonucleotide
caggguccagaag

SEQ ID NO: 926 - RNA, 13 nt, Artificial Sequence
  Description of Artificial Sequence: Synthetic oligonucleotide
ucaagacugcuug

SEQ ID NO: 927 - RNA, 13 nt, Artificial Sequence
  Description of Artificial Sequence: Synthetic oligonucleotide
uccaugucuuugg

SEQ ID NO: 928 - RNA, 11 nt, Artificial Sequence
  Description of Artificial Sequence: Synthetic oligonucleotide
gccugaaacac

SEQ ID NO: 929 - RNA, 12 nt, Artificial Sequence
  Description of Artificial Sequence: Synthetic oligonucleotide
ucucuguaccuc

SEQ ID NO: 930 - RNA, 12 nt, Artificial Sequence
  Description of Artificial Sequence: Synthetic oligonucleotide
agcaagacaaga

SEQ ID NO: 931 - RNA, 13 nt, Artificial Sequence
  Description of Artificial Sequence: Synthetic oligonucleotide
gcaagacaagaaa

SEQ ID NO: 932 - RNA, 12 nt, Artificial Sequence
  Description of Artificial Sequence: Synthetic oligonucleotide
uguacaagaucc

SEQ ID NO: 933 - RNA, 12 nt, Artificial Sequence
  Description of Artificial Sequence: Synthetic oligonucleotide
cguacuugcaga

SEQ ID NO: 934 - RNA, 13 nt, Artificial Sequence
  Description of Artificial Sequence: Synthetic oligonucleotide
cgaucgauacaga

SEQ ID NO: 935 - RNA, 13 nt, Artificial Sequence
  Description of Artificial Sequence: Synthetic oligonucleotide
uauaaaaauaaau

SEQ ID NO: 936 - RNA, 13 nt, Artificial Sequence
  Description of Artificial Sequence: Synthetic oligonucleotide
uaaaaauaaauau

SEQ ID NO: 937 - RNA, 13 nt, Artificial Sequence
  Description of Artificial Sequence: Synthetic oligonucleotide
uuugacugcugug

SEQ ID NO: 938 - RNA, 13 nt, Artificial Sequence
  Description of Artificial Sequence: Synthetic oligonucleotide
ggagaugagagac

SEQ ID NO: 939 - RNA, 10 nt, Artificial Sequence
  Description of Artificial Sequence: Synthetic oligonucleotide
ucccacuugg

SEQ ID NO: 940 - RNA, 10 nt, Artificial Sequence
  Description of Artificial Sequence: Synthetic oligonucleotide
guucacggcc

SEQ ID NO: 941 - RNA, 12 nt, Artificial Sequence
  Description of Artificial Sequence: Synthetic oligonucleotide
accaucacacca

SEQ ID NO: 942 - RNA, 10 nt, Artificial Sequence
  Description of Artificial Sequence: Synthetic oligonucleotide
cugcggguuu

SEQ ID NO: 943 - RNA, 9 nt, Artificial Sequence
  Description of Artificial Sequence: Synthetic oligonucleotide
uccaguuug

SEQ ID NO: 944 - RNA, 12 nt, Artificial Sequence
  Description of Artificial Sequence: Synthetic oligonucleotide
uuaaggacuucu

SEQ ID NO: 945 - RNA, 12 nt, Artificial Sequence
  Description of Artificial Sequence: Synthetic oligonucleotide
agugggacagag

SEQ ID NO: 946 - RNA, 13 nt, Artificial Sequence
  Description of Artificial Sequence: Synthetic oligonucleotide
auuuguuauugug

SEQ ID NO: 947 - RNA, 12 nt, Artificial Sequence
  Description of Artificial Sequence: Synthetic oligonucleotide
ucaaaugcauuu

SEQ ID NO: 948 - RNA, 9 nt, Artificial Sequence
  Description of Artificial Sequence: Synthetic oligonucleotide
aggaaagcc

SEQ ID NO: 949 - RNA, 10 nt, Artificial Sequence
  Description of Artificial Sequence: Synthetic oligonucleotide
ggaaagcccu

SEQ ID NO: 950 - RNA, 11 nt, Artificial Sequence
  Description of Artificial Sequence: Synthetic oligonucleotide
ccagcauggcc

SEQ ID NO: 951 - RNA, 10 nt, Artificial Sequence
  Description of Artificial Sequence: Synthetic oligonucleotide
uucucccuga

SEQ ID NO: 952 - RNA, 11 nt, Artificial Sequence
  Description of Artificial Sequence: Synthetic oligonucleotide
aagaagcccuu

SEQ ID NO: 953 - RNA, 11 nt, Artificial Sequence
  Description of Artificial Sequence: Synthetic oligonucleotide
gaagcccuuca

SEQ ID NO: 954 - RNA, 10 nt, Artificial Sequence
  Description of Artificial Sequence: Synthetic oligonucleotide
cccuucagcg

SEQ ID NO: 955 - RNA, 10 nt, Artificial Sequence
  Description of Artificial Sequence: Synthetic oligonucleotide
cuucagcggc

SEQ ID NO: 956 - RNA, 11 nt, Artificial Sequence
  Description of Artificial Sequence: Synthetic oligonucleotide
cagcggccagu

SEQ ID NO: 957 - RNA, 11 nt, Artificial Sequence
  Description of Artificial Sequence: Synthetic oligonucleotide
gaaaagcuccg

SEQ ID NO: 958 - RNA, 10 nt, Artificial Sequence
  Description of Artificial Sequence: Synthetic oligonucleotide
aaagcuccgg

SEQ ID NO: 959 - RNA, 12 nt, Artificial Sequence
  Description of Artificial Sequence: Synthetic oligonucleotide
gucaacagucug

SEQ ID NO: 960 - RNA, 12 nt, Artificial Sequence
  Description of Artificial Sequence: Synthetic oligonucleotide
agaguucaaaag

SEQ ID NO: 961 - RNA, 12 nt, Artificial Sequence
  Description of Artificial Sequence: Synthetic oligonucleotide
gaguucaaaagc

SEQ ID NO: 962 - RNA, 11 nt, Artificial Sequence
  Description of Artificial Sequence: Synthetic oligonucleotide
ucaaaagcccu

SEQ ID NO: 963 - RNA, 11 nt, Artificial Sequence
  Description of Artificial Sequence: Synthetic oligonucleotide
caaaagcccuu

SEQ ID NO: 964 - RNA, 11 nt, Artificial Sequence
  Description of Artificial Sequence: Synthetic oligonucleotide
aaagcccuuca

SEQ ID NO: 965 - RNA, 11 nt, Artificial Sequence
  Description of Artificial Sequence: Synthetic oligonucleotide
aagcccuucag

SEQ ID NO: 966 - RNA, 12 nt, Artificial Sequence
  Description of Artificial Sequence: Synthetic oligonucleotide
ugaagccgcucg

SEQ ID NO: 967 - RNA, 11 nt, Artificial Sequence
  Description of Artificial Sequence: Synthetic oligonucleotide
acgccagucaa

SEQ ID NO: 968 - RNA, 12 nt, Artificial Sequence
  Description of Artificial Sequence: Synthetic oligonucleotide
ucuuggugcgug

SEQ ID NO: 969 - RNA, 13 nt, Artificial Sequence
  Description of Artificial Sequence: Synthetic oligonucleotide
uuggauucaucag

SEQ ID NO: 970 - RNA, 12 nt, Artificial Sequence
  Description of Artificial Sequence: Synthetic oligonucleotide
ggaauaccuaag

SEQ ID NO: 971 - RNA, 11 nt, Artificial Sequence
  Description of Artificial Sequence: Synthetic oligonucleotide
uuugaggcuca

SEQ ID NO: 972 - RNA, 10 nt, Artificial Sequence
  Description of Artificial Sequence: Synthetic oligonucleotide
cuacaauugg

SEQ ID NO: 973 - RNA, 11 nt, Artificial Sequence
  Description of Artificial Sequence: Synthetic oligonucleotide
aguuaggagcc

SEQ ID NO: 974 - RNA, 12 nt, Artificial Sequence
  Description of Artificial Sequence: Synthetic oligonucleotide
gucaauauccac

SEQ ID NO: 975 - RNA, 12 nt, Artificial Sequence
  Description of Artificial Sequence: Synthetic oligonucleotide
uguucagucaca

SEQ ID NO: 976 - RNA, 11 nt, Artificial Sequence
  Description of Artificial Sequence: Synthetic oligonucleotide
cacacacauac

SEQ ID NO: 977 - RNA, 11 nt, Artificial Sequence
  Description of Artificial Sequence: Synthetic oligonucleotide
uccuuuugcuu

SEQ ID NO: 978 - RNA, 15 nt, Artificial Sequence
  Description of Artificial Sequence: Synthetic oligonucleotide
uuuaaaguaauuuuu

SEQ ID NO: 979 - RNA, 12 nt, Artificial Sequence
  Description of Artificial Sequence: Synthetic oligonucleotide
aacagucaaugg

SEQ ID NO: 980 - RNA, 12 nt, Artificial Sequence
  Description of Artificial Sequence: Synthetic oligonucleotide
cgacaaaccaau

SEQ ID NO: 981 - RNA, 11 nt, Artificial Sequence
  Description of Artificial Sequence: Synthetic oligonucleotide
cugcuaccacu

SEQ ID NO: 982 - RNA, 12 nt, Artificial Sequence
  Description of Artificial Sequence: Synthetic oligonucleotide
caagcggucuua

SEQ ID NO: 983 - RNA, 12 nt, Artificial Sequence
  Description of Artificial Sequence: Synthetic oligonucleotide
gucuuaccggcu

SEQ ID NO: 984 - RNA, 10 nt, Artificial Sequence
  Description of Artificial Sequence: Synthetic oligonucleotide
auggguuacc

SEQ ID NO: 985 - RNA, 10 nt, Artificial Sequence
  Description of Artificial Sequence: Synthetic oligonucleotide
uuaccugcga

SEQ ID NO: 986 - RNA, 11 nt, Artificial Sequence
  Description of Artificial Sequence: Synthetic oligonucleotide
aucuugcugag

SEQ ID NO: 987 - RNA, 12 nt, Artificial Sequence
  Description of Artificial Sequence: Synthetic oligonucleotide
gcauaaaacagu

SEQ ID NO: 988 - RNA, 11 nt, Artificial Sequence
  Description of Artificial Sequence: Synthetic oligonucleotide
uccuuuauccu

SEQ ID NO: 989 - RNA, 11 nt, Artificial Sequence
  Description of Artificial Sequence: Synthetic oligonucleotide
aacgcaaguug

SEQ ID NO: 990 - RNA, 12 nt, Artificial Sequence
  Description of Artificial Sequence: Synthetic oligonucleotide
aacugaaaccau

SEQ ID NO: 991 - RNA, 13 nt, Artificial Sequence
  Description of Artificial Sequence: Synthetic oligonucleotide
cuuuguuaaauau

SEQ ID NO: 992 - RNA, 13 nt, Artificial Sequence
  Description of Artificial Sequence: Synthetic oligonucleotide
uauauuaaaaguu

SEQ ID NO: 993 - RNA, 12 nt, Artificial Sequence
  Description of Artificial Sequence: Synthetic oligonucleotide
uuuugacuuaac

SEQ ID NO: 994 - RNA, 12 nt, Artificial Sequence
  Description of Artificial Sequence: Synthetic oligonucleotide
caaacucagcac

SEQ ID NO: 995 - RNA, 10 nt, Artificial Sequence
  Description of Artificial Sequence: Synthetic oligonucleotide
gcugaccuca

SEQ ID NO: 996 - RNA, 13 nt, Artificial Sequence
  Description of Artificial Sequence: Synthetic oligonucleotide
uuauucagaucgc

SEQ ID NO: 997 - RNA, 12 nt, Artificial Sequence
  Description of Artificial Sequence: Synthetic oligonucleotide
ggguucugggau

SEQ ID NO: 998 - RNA, 14 nt, Artificial Sequence
  Description of Artificial Sequence: Synthetic oligonucleotide
uauuggaaauuaug

SEQ ID NO: 999 - RNA, 12 nt, Artificial Sequence
  Description of Artificial Sequence: Synthetic oligonucleotide
uggaagcacuag

SEQ ID NO: 1000 - RNA, 12 nt, Artificial Sequence
  Description of Artificial Sequence: Synthetic oligonucleotide
uuuuuaugugga

SEQ ID NO: 1001 - RNA, 11 nt, Artificial Sequence
  Description of Artificial Sequence: Synthetic oligonucleotide
gaauugguaga

SEQ ID NO: 1002 - RNA, 12 nt, Artificial Sequence
  Description of Artificial Sequence: Synthetic oligonucleotide
uagacuuggaga

SEQ ID NO: 1003 - RNA, 12 nt, Artificial Sequence
  Description of Artificial Sequence: Synthetic oligonucleotide
uacaguauucca

SEQ ID NO: 1004 - RNA, 14 nt, Artificial Sequence
  Description of Artificial Sequence: Synthetic oligonucleotide
cacugaugaauuaa

SEQ ID NO: 1005 - RNA, 11 nt, Artificial Sequence
  Description of Artificial Sequence: Synthetic oligonucleotide
cacaucaucac

SEQ ID NO: 1006 - RNA, 12 nt, Artificial Sequence
  Description of Artificial Sequence: Synthetic oligonucleotide
ucaccaaacaga

SEQ ID NO: 1007 - RNA, 11 nt, Artificial Sequence
  Description of Artificial Sequence: Synthetic oligonucleotide
gaacaugaugg

SEQ ID NO: 1008 - RNA, 11 nt, Artificial Sequence
  Description of Artificial Sequence: Synthetic oligonucleotide
auguagacugc

SEQ ID NO: 1009 - RNA, 12 nt, Artificial Sequence
  Description of Artificial Sequence: Synthetic oligonucleotide
gaucuauuuaug

SEQ ID NO: 1010 - RNA, 11 nt, Artificial Sequence
  Description of Artificial Sequence: Synthetic oligonucleotide
cacuauuauca

SEQ ID NO: 1011 - RNA, 10 nt, Artificial Sequence
  Description of Artificial Sequence: Synthetic oligonucleotide
ucaguucugc

SEQ ID NO: 1012 - RNA, 12 nt, Artificial Sequence
  Description of Artificial Sequence: Synthetic oligonucleotide
gauuaaaccuac

SEQ ID NO: 1013 - RNA, 12 nt, Artificial Sequence
  Description of Artificial Sequence: Synthetic oligonucleotide
uaaaauccuucu

SEQ ID NO: 1014 - RNA, 11 nt, Artificial Sequence
  Description of Artificial Sequence: Synthetic oligonucleotide
augcuguagac

SEQ ID NO: 1015 - RNA, 12 nt, Artificial Sequence
  Description of Artificial Sequence: Synthetic oligonucleotide
ugauaggaauag

SEQ ID NO: 1016 - RNA, 10 nt, Artificial Sequence
  Description of Artificial Sequence: Synthetic oligonucleotide
auggcccuga

SEQ ID NO: 1017 - RNA, 10 nt, Artificial Sequence
  Description of Artificial Sequence: Synthetic oligonucleotide
uccucaagca

SEQ ID NO: 1018 - RNA, 9 nt, Artificial Sequence
  Description of Artificial Sequence: Synthetic oligonucleotide
uucagccca

SEQ ID NO: 1019 - RNA, 10 nt, Artificial Sequence
  Description of Artificial Sequence: Synthetic oligonucleotide
cugcugaacc

SEQ ID NO: 1020 - RNA, 11 nt, Artificial Sequence
  Description of Artificial Sequence: Synthetic oligonucleotide
aguucucuuca

SEQ ID NO: 1021 - RNA, 10 nt, Artificial Sequence
  Description of Artificial Sequence: Synthetic oligonucleotide
cagccuagag

SEQ ID NO: 1022 - RNA, 12 nt, Artificial Sequence
  Description of Artificial Sequence: Synthetic oligonucleotide
ucugugaagugu

SEQ ID NO: 1023 - RNA, 13 nt, Artificial Sequence
  Description of Artificial Sequence: Synthetic oligonucleotide
gagaaaauuucaa

SEQ ID NO: 1024 - RNA, 10 nt, Artificial Sequence
  Description of Artificial Sequence: Synthetic oligonucleotide
auccuccuga

SEQ ID NO: 1025 - RNA, 11 nt, Artificial Sequence
  Description of Artificial Sequence: Synthetic oligonucleotide
ugacaucauau

SEQ ID NO: 1026 - RNA, 12 nt, Artificial Sequence
  Description of Artificial Sequence: Synthetic oligonucleotide
aucuucaucaua

SEQ ID NO: 1027 - RNA, 12 nt, Artificial Sequence
  Description of Artificial Sequence: Synthetic oligonucleotide
acuagcuauuaa

SEQ ID NO: 1028 - RNA, 13 nt, Artificial Sequence
  Description of Artificial Sequence: Synthetic oligonucleotide
cucuacuaaaaau

SEQ ID NO: 1029 - RNA, 11 nt, Artificial Sequence
  Description of Artificial Sequence: Synthetic oligonucleotide
cuaucucgccu

SEQ ID NO: 1030 - RNA, 12 nt, Artificial Sequence
  Description of Artificial Sequence: Synthetic oligonucleotide
uucgguccaguu

SEQ ID NO: 1031 - RNA, 10 nt, Artificial Sequence
  Description of Artificial Sequence: Synthetic oligonucleotide
auguagccgc

SEQ ID NO: 1032 - RNA, 11 nt, Artificial Sequence
  Description of Artificial Sequence: Synthetic oligonucleotide
gaggagacuug

SEQ ID NO: 1033 - RNA, 11 nt, Artificial Sequence
  Description of Artificial Sequence: Synthetic oligonucleotide
aguagugagga

SEQ ID NO: 1034 - RNA, 13 nt, Artificial Sequence
  Description of Artificial Sequence: Synthetic oligonucleotide
agaugaguacaaa

SEQ ID NO: 1035 - RNA, 12 nt, Artificial Sequence
  Description of Artificial Sequence: Synthetic oligonucleotide
uuguuaaugggc

SEQ ID NO: 1036 - RNA, 12 nt, Artificial Sequence
  Description of Artificial Sequence: Synthetic oligonucleotide
uuuuaauuuauu

SEQ ID NO: 1037 - RNA, 11 nt, Artificial Sequence
  Description of Artificial Sequence: Synthetic oligonucleotide
auuuaaauaug

SEQ ID NO: 1038 - RNA, 12 nt, Artificial Sequence
  Description of Artificial Sequence: Synthetic oligonucleotide
auccuuuguuuc

SEQ ID NO: 1039 - RNA, 13 nt, Artificial Sequence
  Description of Artificial Sequence: Synthetic oligonucleotide
gucuaaguguuug

SEQ ID NO: 1040 - RNA, 11 nt, Artificial Sequence
  Description of Artificial Sequence: Synthetic oligonucleotide
ccugugacaaa

SEQ ID NO: 1041 - RNA, 12 nt, Artificial Sequence
  Description of Artificial Sequence: Synthetic oligonucleotide
caggcugaauua

SEQ ID NO: 1042 - RNA, 13 nt, Artificial Sequence
  Description of Artificial Sequence: Synthetic oligonucleotide
ucauucuuacaau

SEQ ID NO: 1043 - RNA, 14 nt, Artificial Sequence
  Description of Artificial Sequence: Synthetic oligonucleotide
cauucuuacaauug

SEQ ID NO: 1044 - RNA, 11 nt, Artificial Sequence
  Description of Artificial Sequence: Synthetic oligonucleotide
agagaguguac

SEQ ID NO: 1045 - RNA, 11 nt, Artificial Sequence
  Description of Artificial Sequence: Synthetic oligonucleotide
gaacucagcag

SEQ ID NO: 1046 - RNA, 12 nt, Artificial Sequence
  Description of Artificial Sequence: Synthetic oligonucleotide
uuauuuucagua

SEQ ID NO: 1047 - RNA, 11 nt, Artificial Sequence
  Description of Artificial Sequence: Synthetic oligonucleotide
cuuaaauggaa

SEQ ID NO: 1048 - RNA, 12 nt, Artificial Sequence
  Description of Artificial Sequence: Synthetic oligonucleotide
gccuaaaauugu

SEQ ID NO: 1049 - RNA, 12 nt, Artificial Sequence
  Description of Artificial Sequence: Synthetic oligonucleotide
acuaacaucugg

SEQ ID NO: 1050 - RNA, 11 nt, Artificial Sequence
  Description of Artificial Sequence: Synthetic oligonucleotide
gacugugagcu

SEQ ID NO: 1051 - RNA, 13 nt, Artificial Sequence
  Description of Artificial Sequence: Synthetic oligonucleotide
gcuuuuuauuaau

SEQ ID NO: 1052 - RNA, 12 nt, Artificial Sequence
  Description of Artificial Sequence: Synthetic oligonucleotide
ucuucuuacauu

SEQ ID NO: 1053 - RNA, 14 nt, Artificial Sequence
  Description of Artificial Sequence: Synthetic oligonucleotide
auuuguaaaaaugu

SEQ ID NO: 1054 - RNA, 14 nt, Artificial Sequence
  Description of Artificial Sequence: Synthetic oligonucleotide
ucuuaauucauauu

SEQ ID NO: 1055 - RNA, 12 nt, Artificial Sequence
  Description of Artificial Sequence: Synthetic oligonucleotide
aacuaaucauga

SEQ ID NO: 1056 - RNA, 11 nt, Artificial Sequence
  Description of Artificial Sequence: Synthetic oligonucleotide
cugcucuuggg

SEQ ID NO: 1057 - RNA, 12 nt, Artificial Sequence
  Description of Artificial Sequence: Synthetic oligonucleotide
aguagcuuugag

SEQ ID NO: 1058 - RNA, 13 nt, Artificial Sequence
  Description of Artificial Sequence: Synthetic oligonucleotide
acguaauauuuca

SEQ ID NO: 1059 - RNA, 12 nt, Artificial Sequence
  Description of Artificial Sequence: Synthetic oligonucleotide
auucucuucacu

SEQ ID NO: 1060 - RNA, 13 nt, Artificial Sequence
  Description of Artificial Sequence: Synthetic oligonucleotide
uaaugcuaagaaa

SEQ ID NO: 1061 - RNA, 11 nt, Artificial Sequence
  Description of Artificial Sequence: Synthetic oligonucleotide
cugaaaaucaa

SEQ ID NO: 1062 - RNA, 13 nt, Artificial Sequence
  Description of Artificial Sequence: Synthetic oligonucleotide
auaugauuacuuu

SEQ ID NO: 1063 - RNA, 13 nt, Artificial Sequence
  Description of Artificial Sequence: Synthetic oligonucleotide
auuuuguucuaca

SEQ ID NO: 1064 - RNA, 11 nt, Artificial Sequence
  Description of Artificial Sequence: Synthetic oligonucleotide
ccgggacucuc

SEQ ID NO: 1065 - RNA, 13 nt, Artificial Sequence
  Description of Artificial Sequence: Synthetic oligonucleotide
cuuuaaaguaaag

SEQ ID NO: 1066 - RNA, 12 nt, Artificial Sequence
  Description of Artificial Sequence: Synthetic oligonucleotide
cuggaagccugg

SEQ ID NO: 1067 - RNA, 13 nt, Artificial Sequence
  Description of Artificial Sequence: Synthetic oligonucleotide
aaacaaaagagag

SEQ ID NO: 1068 - RNA, 12 nt, Artificial Sequence
  Description of Artificial Sequence: Synthetic oligonucleotide
ucaguuaugccg

SEQ ID NO: 1069 - RNA, 12 nt, Artificial Sequence
  Description of Artificial Sequence: Synthetic oligonucleotide
aaaagaagucca

SEQ ID NO: 1070 - RNA, 10 nt, Artificial Sequence
  Description of Artificial Sequence: Synthetic oligonucleotide
ggugagguua

SEQ ID NO: 1071 - RNA, 10 nt, Artificial Sequence
  Description of Artificial Sequence: Synthetic oligonucleotide
ggaagaggac

SEQ ID NO: 1072 - RNA, 12 nt, Artificial Sequence
  Description of Artificial Sequence: Synthetic oligonucleotide
agcaaguauugu

SEQ ID NO: 1073 - RNA, 11 nt, Artificial Sequence
  Description of Artificial Sequence: Synthetic oligonucleotide
uuguagcacuc

SEQ ID NO: 1074 - RNA, 13 nt, Artificial Sequence
  Description of Artificial Sequence: Synthetic oligonucleotide
caaaaccacaaau

SEQ ID NO: 1075 - RNA, 11 nt, Artificial Sequence
  Description of Artificial Sequence: Synthetic oligonucleotide
aagcccauaca

SEQ ID NO: 1076 - RNA, 10 nt, Artificial Sequence
  Description of Artificial Sequence: Synthetic oligonucleotide
gcccauacag

SEQ ID NO: 1077 - RNA, 11 nt, Artificial Sequence
  Description of Artificial Sequence: Synthetic oligonucleotide
agaaaccuucc

SEQ ID NO: 1078 - RNA, 9 nt, Artificial Sequence
  Description of Artificial Sequence: Synthetic oligonucleotide
uauaccuac

SEQ ID NO: 1079 - RNA, 12 nt, Artificial Sequence
  Description of Artificial Sequence: Synthetic oligonucleotide
ccaguuuucgga

SEQ ID NO: 1080 - RNA, 8 nt, Artificial Sequence
  Description of Artificial Sequence: Synthetic oligonucleotide
gaacaggg

SEQ ID NO: 1081 - RNA, 12 nt, Artificial Sequence
  Description of Artificial Sequence: Synthetic oligonucleotide
uaacuuuccagu

SEQ ID NO: 1082 - RNA, 13 nt, Artificial Sequence
  Description of Artificial Sequence: Synthetic oligonucleotide
aaguuugguuuug

SEQ ID NO: 1083 - RNA, 11 nt, Artificial Sequence
  Description of Artificial Sequence: Synthetic oligonucleotide
uucccacugua

SEQ ID NO: 1084 - RNA, 12 nt, Artificial Sequence
  Description of Artificial Sequence: Synthetic oligonucleotide
gauaccauauga

SEQ ID NO: 1085 - RNA, 10 nt, Artificial Sequence
  Description of Artificial Sequence: Synthetic oligonucleotide
acaugggcug

SEQ ID NO: 1086 - RNA, 12 nt, Artificial Sequence
  Description of Artificial Sequence: Synthetic oligonucleotide
aacuuuuucaua

SEQ ID NO: 1087 - RNA, 11 nt, Artificial Sequence
  Description of Artificial Sequence: Synthetic oligonucleotide
augaggccgga

SEQ ID NO: 1088 - RNA, 10 nt, Artificial Sequence
  Description of Artificial Sequence: Synthetic oligonucleotide
cugcauuugu

SEQ ID NO: 1089 - RNA, 12 nt, Artificial Sequence
  Description of Artificial Sequence: Synthetic oligonucleotide
auguuuacuacc

SEQ ID NO: 1090 - RNA, 14 nt, Artificial Sequence
  Description of Artificial Sequence: Synthetic oligonucleotide
auuuuuugaugaaa

SEQ ID NO: 1091 - RNA, 13 nt, Artificial Sequence
  Description of Artificial Sequence: Synthetic oligonucleotide
agugugugaauuu

SEQ ID NO: 1092 - RNA, 12 nt, Artificial Sequence
  Description of Artificial Sequence: Synthetic oligonucleotide
agcaauguaugu

SEQ ID NO: 1093 - RNA, 13 nt, Artificial Sequence
  Description of Artificial Sequence: Synthetic oligonucleotide
aagcacauauaua

SEQ ID NO: 1094 - RNA, 13 nt, Artificial Sequence
  Description of Artificial Sequence: Synthetic oligonucleotide
uaauaguuucucc

SEQ ID NO: 1095 - RNA, 12 nt, Artificial Sequence
  Description of Artificial Sequence: Synthetic oligonucleotide
guuucuccaaau

SEQ ID NO: 1096 - RNA, 12 nt, Artificial Sequence
  Description of Artificial Sequence: Synthetic oligonucleotide
acuuccuagaaa

SEQ ID NO: 1097 - RNA, 12 nt, Artificial Sequence
  Description of Artificial Sequence: Synthetic oligonucleotide
acaccauauaug

SEQ ID NO: 1098 - RNA, 13 nt, Artificial Sequence
  Description of Artificial Sequence: Synthetic oligonucleotide
uauaugaauggag

SEQ ID NO: 1099 - RNA, 12 nt, Artificial Sequence
  Description of Artificial Sequence: Synthetic oligonucleotide
cauuuacaggga

SEQ ID NO: 1100 - RNA, 12 nt, Artificial Sequence
  Description of Artificial Sequence: Synthetic oligonucleotide
auuuacagggac

SEQ ID NO: 1101 - RNA, 9 nt, Artificial Sequence
  Description of Artificial Sequence: Synthetic oligonucleotide
gggaccuga

SEQ ID NO: 1102 - RNA, 13 nt, Artificial Sequence
  Description of Artificial Sequence: Synthetic oligonucleotide
guuugacugcauc

SEQ ID NO: 1103 - RNA, 12 nt, Artificial Sequence
  Description of Artificial Sequence: Synthetic oligonucleotide
uugacugcaucg

SEQ ID NO: 1104 - RNA, 11 nt, Artificial Sequence
  Description of Artificial Sequence: Synthetic oligonucleotide
aguucacaggg

SEQ ID NO: 1105 - RNA, 12 nt, Artificial Sequence
  Description of Artificial Sequence: Synthetic oligonucleotide
gcaccucugucc

SEQ ID NO: 1106 - RNA, 14 nt, Artificial Sequence
  Description of Artificial Sequence: Synthetic oligonucleotide
guuugucuuuuuaa

SEQ ID NO: 1107 - RNA, 13 nt, Artificial Sequence
  Description of Artificial Sequence: Synthetic oligonucleotide
uugucuuuuuaag

SEQ ID NO: 1108 - RNA, 12 nt, Artificial Sequence
  Description of Artificial Sequence: Synthetic oligonucleotide
cuaaagguuguc

SEQ ID NO: 1109 - RNA, 11 nt, Artificial Sequence
  Description of Artificial Sequence: Synthetic oligonucleotide
agguugucgac

SEQ ID NO: 1110 - RNA, 12 nt, Artificial Sequence
  Description of Artificial Sequence: Synthetic oligonucleotide
ccuggcaauugu

SEQ ID NO: 1111 - RNA, 11 nt, Artificial Sequence
  Description of Artificial Sequence: Synthetic oligonucleotide
guggugcgagg

SEQ ID NO: 1112 - RNA, 12 nt, Artificial Sequence
  Description of Artificial Sequence: Synthetic oligonucleotide
gagacaugaaau

SEQ ID NO: 1113 - RNA, 12 nt, Artificial Sequence
  Description of Artificial Sequence: Synthetic oligonucleotide
uauauuucucca

SEQ ID NO: 1114 - RNA, 9 nt, Artificial Sequence
  Description of Artificial Sequence: Synthetic oligonucleotide
augaaggcu

SEQ ID NO: 1115 - RNA, 10 nt, Artificial Sequence
  Description of Artificial Sequence: Synthetic oligonucleotide
cuggaguggu

SEQ ID NO: 1116 - RNA, 10 nt, Artificial Sequence
  Description of Artificial Sequence: Synthetic oligonucleotide
ggaagagagg

SEQ ID NO: 1117 - RNA, 11 nt, Artificial Sequence
  Description of Artificial Sequence: Synthetic oligonucleotide
uugcaucgggc

SEQ ID NO: 1118 - RNA, 12 nt, Artificial Sequence
  Description of Artificial Sequence: Synthetic oligonucleotide
uauccuacugug

SEQ ID NO: 1119 - RNA, 12 nt, Artificial Sequence
  Description of Artificial Sequence: Synthetic oligonucleotide
ccuacuguguaa

SEQ ID NO: 1120 - RNA, 11 nt, Artificial Sequence
  Description of Artificial Sequence: Synthetic oligonucleotide
cuuguagugua

SEQ ID NO: 1121 - RNA, 12 nt, Artificial Sequence
  Description of Artificial Sequence: Synthetic oligonucleotide
cuuuguugauug

SEQ ID NO: 1122 - RNA, 13 nt, Artificial Sequence
  Description of Artificial Sequence: Synthetic oligonucleotide
uuguugauugaaa

SEQ ID NO: 1123 - RNA, 14 nt, Artificial Sequence
  Description of Artificial Sequence: Synthetic oligonucleotide
ucuuuuucuuccau

SEQ ID NO: 1124 - RNA, 12 nt, Artificial Sequence
  Description of Artificial Sequence: Synthetic oligonucleotide
aucuuccuucua

SEQ ID NO: 1125 - RNA, 12 nt, Artificial Sequence
  Description of Artificial Sequence: Synthetic oligonucleotide
ugaaugcuucau

SEQ ID NO: 1126 - RNA, 12 nt, Artificial Sequence
  Description of Artificial Sequence: Synthetic oligonucleotide
gaaugcuucaug

SEQ ID NO: 1127 - RNA, 12 nt, Artificial Sequence
  Description of Artificial Sequence: Synthetic oligonucleotide
auucuacuuuga

SEQ ID NO: 1128 - RNA, 12 nt, Artificial Sequence
  Description of Artificial Sequence: Synthetic oligonucleotide
gcaacuacagac

SEQ ID NO: 1129 - RNA, 12 nt, Artificial Sequence
  Description of Artificial Sequence: Synthetic oligonucleotide
accaaggucaac

SEQ ID NO: 1130 - RNA, 12 nt, Artificial Sequence
  Description of Artificial Sequence: Synthetic oligonucleotide
gacuaucucgac

SEQ ID NO: 1131 - RNA, 12 nt, Artificial Sequence
  Description of Artificial Sequence: Synthetic oligonucleotide
accuucccaaac

SEQ ID NO: 1132 - RNA, 13 nt, Artificial Sequence
  Description of Artificial Sequence: Synthetic oligonucleotide
caagcuuagaacu

SEQ ID NO: 1133 - RNA, 14 nt, Artificial Sequence
  Description of Artificial Sequence: Synthetic oligonucleotide
gcuuagaacuuuaa

SEQ ID NO: 1134 - RNA, 13 nt, Artificial Sequence
  Description of Artificial Sequence: Synthetic oligonucleotide
aacuuuaagcaac

SEQ ID NO: 1135 - RNA, 10 nt, Artificial Sequence
  Description of Artificial Sequence: Synthetic oligonucleotide
agaccaccac

SEQ ID NO: 1136 - RNA, 13 nt, Artificial Sequence
  Description of Artificial Sequence: Synthetic oligonucleotide
cgagaaauaaagu

SEQ ID NO: 1137 - RNA, 13 nt, Artificial Sequence
  Description of Artificial Sequence: Synthetic oligonucleotide
gagaaauaaaguu

SEQ ID NO: 1138 - RNA, 11 nt, Artificial Sequence
  Description of Artificial Sequence: Synthetic oligonucleotide
ggaaaugaucc

SEQ ID NO: 1139 - RNA, 12 nt, Artificial Sequence
  Description of Artificial Sequence: Synthetic oligonucleotide
aagaaaugaaac

SEQ ID NO: 1140 - RNA, 12 nt, Artificial Sequence
  Description of Artificial Sequence: Synthetic oligonucleotide
uuuccauccucc

SEQ ID NO: 1141 - RNA, 14 nt, Artificial Sequence
  Description of Artificial Sequence: Synthetic oligonucleotide
cugaaaaucuuuga

SEQ ID NO: 1142 - RNA, 10 nt, Artificial Sequence
  Description of Artificial Sequence: Synthetic oligonucleotide
gccguucagg

SEQ ID NO: 1143 - RNA, 12 nt, Artificial Sequence
  Description of Artificial Sequence: Synthetic oligonucleotide
aggguccagaag

SEQ ID NO: 1144 - RNA, 12 nt, Artificial Sequence
  Description of Artificial Sequence: Synthetic oligonucleotide
caagacugcuug

SEQ ID NO: 1145 - RNA, 12 nt, Artificial Sequence
  Description of Artificial Sequence: Synthetic oligonucleotide
ccaugucuuugg

SEQ ID NO: 1146 - RNA, 10 nt, Artificial Sequence
  Description of Artificial Sequence: Synthetic oligonucleotide
ccugaaacac

SEQ ID NO: 1147 - RNA, 11 nt, Artificial Sequence
  Description of Artificial Sequence: Synthetic oligonucleotide
cucuguaccuc

SEQ ID NO: 1148 - RNA, 11 nt, Artificial Sequence
  Description of Artificial Sequence: Synthetic oligonucleotide
gcaagacaaga

SEQ ID NO: 1149 - RNA, 12 nt, Artificial Sequence
  Description of Artificial Sequence: Synthetic oligonucleotide
caagacaagaaa

SEQ ID NO: 1150 - RNA, 11 nt, Artificial Sequence
  Description of Artificial Sequence: Synthetic oligonucleotide
guacaagaucc

SEQ ID NO: 1151 - RNA, 11 nt, Artificial Sequence
  Description of Artificial Sequence: Synthetic oligonucleotide
guacuugcaga

SEQ ID NO: 1152 - RNA, 12 nt, Artificial Sequence
  Description of Artificial Sequence: Synthetic oligonucleotide
gaucgauacaga

SEQ ID NO: 1153 - RNA, 12 nt, Artificial Sequence
  Description of Artificial Sequence: Synthetic oligonucleotide
auaaaaauaaau

SEQ ID NO: 1154 - RNA, 12 nt, Artificial Sequence
  Description of Artificial Sequence: Synthetic oligonucleotide
aaaaauaaauau

SEQ ID NO: 1155 - RNA, 12 nt, Artificial Sequence
  Description of Artificial Sequence: Synthetic oligonucleotide
uugacugcugug

SEQ ID NO: 1156 - RNA, 12 nt, Artificial Sequence
  Description of Artificial Sequence: Synthetic oligonucleotide
gagaugagagac

SEQ ID NO: 1157 - RNA, 9 nt, Artificial Sequence
  Description of Artificial Sequence: Synthetic oligonucleotide
cccacuugg

SEQ ID NO: 1158 - RNA, 5616 nt, Homo sapiens
ccccggcgcagcgcggccgcagcagccuccgccccccgcacggugugagcgcccgacgcggccgaggcggccggagucccgagcuagccccggcggccgccgccgcccagaccggacgacaggccaccucgucggcguccgcccgaguccccgccucgccgccaacgccacaaccaccgcgcacggcccccugacuccguccaguauugaucgggagagccggagcgagcucuucggggagcagcgaugcgacccuccgggacggccggggcagcgcuccuggcgcugcuggcugcgcucugcccggcgagucgggcucuggaggaaaagaaaguuugccaaggcacgaguaacaagcucacgcaguugggcacuuuugaagaucauuuucucagccuccagaggauguucaauaacugugaggugguccuugggaauuuggaaauuaccuaugugcagaggaauuaugaucuuuccuucuuaaagaccauccaggagguggcugguuauguccucauugcccucaacacaguggagcgaauuccuuuggaaaaccugcagaucaucagaggaaauauguacuacgaaaauuccuaugccuuagcagucuuaucuaacuaugaugcaaauaaaaccggacugaaggagcugcccaugagaaauuuacaggaaauccugcauggcgccgugcgguucagcaacaacccugcccugugcaacguggagagcauccaguggcgggacauagucagcagugacuuucucagcaacaugucgauggacuuccagaaccaccugggcagcugccaaaagugugauccaagcugucccaaugggagcugcuggggugcaggagaggagaacugccagaaacugaccaaaaucaucugugcccagcagugcuccgggcgcugccguggcaagucccccagugacugcugccacaaccagugugcugcaggcugcacaggcccccgggagagcgacugccuggucugccgcaaauuccgagacgaagccacgugcaaggacaccugccccccacucaugcucuacaaccccaccacguaccagauggaugugaaccccgagggcaaauacagcuuuggugccaccugcgugaagaaguguccccguaauuauguggugacagaucacggcucgugcguccgagccuguggggccgacagcuaugagauggaggaagacggcguccgcaaguguaagaagugcgaagggccuugccgcaaaguguguaacggaauagguauuggugaauuuaaagacucacucuccauaaaugcuacgaauauuaaacacuucaaaaacugcaccuccaucaguggcgaucuccacauccugccgguggcauuuaggggugacuccuucacacauacuccuccucuggauccacaggaacuggauauucugaaaaccguaaaggaaaucacaggguuuuugcugauucaggcuuggccugaaaacaggacggaccuccaugccuuugagaaccuagaaaucauacgcggcaggaccaagcaacauggucaguuuucucuugcagucgucagccugaacauaacauccuugggauuacgcucccucaaggagauaagugauggagaugugauaauuucaggaaacaaaaauuugugcuaugcaaauacaauaaacuggaaaaaacuguuugggaccuccggucagaaaaccaaaauuauaagcaacagaggugaaaacagcugcaaggccacaggccaggucugccaugccuugugcucccccgagggcugcuggggcccggagcccagggacugcgucucuugccggaaugucagccgaggcagggaaugcguggacaagugcaaccuucuggagggugagccaagggaguuuguggagaacucugagugcauacagugccacccagagugccugccucaggccaugaacaucaccugcacaggacggggaccagacaacuguauccagugugcccacuacauugacggcccccacugcgucaagaccugcccggcaggagucaugggagaaaacaacacccuggucuggaaguacgcagacgccggccaugugugccaccugugccauccaaacugcaccuacggaugcacugggccaggucuugaaggcuguccaacgaaugggccuaagaucccguccaucgccacugggauggugggggcccuccucuugcugcuggugguggcccuggggaucggccucuucaugcgaaggcgccacaucguucggaagcgcacgcugcggaggcugcugcaggagagggagcuuguggagccucuuacacccaguggagaagcucccaaccaagcucucuugaggaucuugaaggaaacugaauucaaaaagaucaaagugcugggcuccggugcguucggcacgguguauaagggacucuggaucccagaaggugagaaaguuaaaauucccgucgcuaucaaggaauuaagagaagcaacaucuccgaaagccaacaaggaaauccucgaugaagccuacgugauggccagcguggacaacccccacgugugccgccugcugggcaucugccucaccuccaccgugcagcucaucacgcagcucaugcccuucggcugccuccuggacuauguccgggaacacaaagacaauauuggcucccaguaccugcucaacuggugugugcagaucgcaaagggcaugaacuacuuggaggaccgucgcuuggugcaccgcgaccuggcagccaggaacguacuggugaaaacaccgcagcaugucaagaucacagauuuugggcuggccaaacugcugggugcggaagagaaagaauaccaugcagaaggaggcaaagugccuaucaaguggauggcauuggaaucaauuuuacacagaaucuauacccaccagagugaugucuggagcuacggggugaccguuugggaguugaugaccuuuggauccaagccauaugacggaaucccugccagcgagaucuccuccauccuggagaaaggagaacgccucccucagccacccauauguaccaucgaugucuacaugaucauggucaagugcuggaugauagacgcagauagucgcccaaaguuccgugaguugaucaucgaauucuccaaaauggcccgagacccccagcgcuaccuugucauucagggggaugaaagaaugcauuugccaaguccuacagacuccaacuucuaccgugcccugauggaugaagaagacauggacgacgugguggaugccgacgaguaccucaucccacagcagggcuucuucagcagccccuccacgucacggacuccccuccugagcucucugagugcaaccagcaacaauuccaccguggcuugcauugauagaaaugggcugcaaagcugucccaucaaggaagacagcuucuugcagcgauacagcucagaccccacaggcgccuugacugaggacagcauagacgacaccuuccucccagugccugaauacauaaaccaguccguucccaaaaggcccgcuggcucugugcagaauccugucuaucacaaucagccucugaaccccgcgcccagcagagacccacacuaccaggacccccacagcacugcagugggcaaccccgaguaucucaacacuguccagcccaccugugucaacagcacauucgacagcccugcccacugggcccagaaaggcagccaccaaauuagccuggacaacccugacuaccagcaggacuucuuucccaaggaagccaagccaaauggcaucuuuaagggcuccacagcugaaaaugcagaauaccuaagggucgcgccacaaagcagugaauuuauuggagcaugaccacggaggauaguaugagcccuaaaaauccagacucuuucgauacccaggaccaagccacagcagguccuccaucccaacagccaugcccgcauuagcucuuagacccacagacugguuuugcaacguuuacaccgacuagccaggaaguacuuccaccucgggcacauuuugggaaguugcauuccuuugucuucaaacugugaagcauuuacagaaacgcauccagcaagaauauugucccuuugagcagaaauuuaucuuucaaagagguauauuugaaaaaaaaaaaaaguauaugugaggauuuuuauugauuggggaucuuggaguuuuucauugucgcuauugauuuuuacuucaaugggcucuuccaacaaggaagaagcuugcugguagcacuugcuacccugaguucauccaggcccaacugugagcaaggagcacaagccacaagucuuccagaggaugcuugauuccagugguucugcuucaaggcuuccacugcaaaacacuaaagauccaagaaggccuucauggccccagcaggccggaucgguacuguaucaagucauggcagguacaguaggauaagccacucugucccuuccugggcaaagaagaaacggaggggauggaauucuuccuuagacuuacuuuuguaaaaauguccccacgguacuuacuccccacugauggaccagugguuuccagucaugagcguuagacugacuuguuugucuuccauuccauuguuuugaaacucaguaugcugccccugucuugcugucaugaaaucagcaagagaggaugacacaucaaauaauaacucggauuccagcccacauuggauucaucagcauuuggaccaauagcccacagcugagaauguggaauaccuaaggauagcaccgcuuuuguucucgcaaaaacguaucuccuaauuugaggcucagaugaaaugcaucagguccuuuggggcauagaucagaagacuacaaaaaugaagcugcucugaaaucuccuuuagccaucaccccaaccccccaaaauuaguuuguguuacuuauggaagauaguuuucuccuuuuacuucacuucaaaagcuuuuuacucaaagaguauauguucccuccaggucagcugcccccaaacccccuccuuacgcuuugucacacaaaaagugucucugccuugagucaucuauucaagcacuuacagcucuggccacaacagggcauuuuacaggugcgaaugacaguagcauuaugaguaguguggaauucagguaguaaauaugaaacuaggguuugaaauugauaaugcuuucacaacauuugcagauguuuuagaaggaaaaaaguuccuuccuaaaauaauuucucuacaauuggaagauuggaagauucagcuaguuaggagcccaccuuuuuuccuaaucugugugugcccuguaaccugacugguuaacagcaguccuuuguaaacaguguuuuaaacucuccuagucaauauccaccccauccaauuuaucaaggaagaaaugguucagaaaauauuuucagccuacaguuauguucagucacacacacauacaaaauguuccuuuugcuuuuaaaguaauuuuugacucccagaucagucagagccccuacagcauuguuaagaaaguauuugauuuuugucucaaugaaaauaaaacuauauucauuuccacucuaaaaaaaaaaaaaaaaa

SEQ ID NO: 1159 - RNA, 2239 nt, Homo sapiens
ccccggcgcagcgcggccgcagcagccuccgccccccgcacggugugagcgcccgacgcggccgaggcggccggagucccgagcuagccccggcggccgccgccgcccagaccggacgacaggccaccucgucggcguccgcccgaguccccgccucgccgccaacgccacaaccaccgcgcacggcccccugacuccguccaguauugaucgggagagccggagcgagcucuucggggagcagcgaugcgacccuccgggacggccggggcagcgcuccuggcgcugcuggcugcgcucugcccggcgagucgggcucuggaggaaaagaaaguuugccaaggcacgaguaacaagcucacgcaguugggcacuuuugaagaucauuuucucagccuccagaggauguucaauaacugugaggugguccuugggaauuuggaaauuaccuaugugcagaggaauuaugaucuuuccuucuuaaagaccauccaggagguggcugguuauguccucauugcccucaacacaguggagcgaauuccuuuggaaaaccugcagaucaucagaggaaauauguacuacgaaaauuccuaugccuuagcagucuuaucuaacuaugaugcaaauaaaaccggacugaaggagcugcccaugagaaauuuacaggaaauccugcauggcgccgugcgguucagcaacaacccugcccugugcaacguggagagcauccaguggcgggacauagucagcagugacuuucucagcaacaugucgauggacuuccagaaccaccugggcagcugccaaaagugugauccaagcugucccaaugggagcugcuggggugcaggagaggagaacugccagaaacugaccaaaaucaucugugcccagcagugcuccgggcgcugccguggcaagucccccagugacugcugccacaaccagugugcugcaggcugcacaggcccccgggagagcgacugccuggucugccgcaaauuccgagacgaagccacgugcaaggacaccugccccccacucaugcucuacaaccccaccacguaccagauggaugugaaccccgagggcaaauacagcuuuggugccaccugcgugaagaaguguccccguaauuauguggugacagaucacggcucgugcguccgagccuguggggccgacagcuaugagauggaggaagacggcguccgcaaguguaagaagugcgaagggccuugccgcaaaguguguaacggaauagguauuggugaauuuaaagacucacucuccauaaaugcuacgaauauuaaacacuucaaaaacugcaccuccaucaguggcgaucuccacauccugccgguggcauuuaggggugacuccuucacacauacuccuccucuggauccacaggaacuggauauucugaaaaccguaaaggaaaucacaggguuuuugcugauucaggcuuggccugaaaacaggacggaccuccaugccuuugagaaccuagaaaucauacgcggcaggaccaagcaacauggucaguuuucucuugcagucgucagccugaacauaacauccuugggauuacgcucccucaaggagauaagugauggagaugugauaauuucaggaaacaaaaauuugugcuaugcaaauacaauaaacuggaaaaaacuguuugggaccuccggucagaaaaccaaaauuauaagcaacagaggugaaaacagcugcaaggccacaggccaggucugccaugccuugugcucccccgagggcugcuggggcccggagcccagggacugcgucucuugccggaaugucagccgaggcagggaaugcguggacaagugcaaccuucuggagggugagccaagggaguuuguggagaacucugagugcauacagugccacccagagugccugccucaggccaugaacaucaccugcacaggacggggaccagacaacuguauccagugugcccacuacauugacggcccccacugcgucaagaccugcccggcaggagucaugggagaaaacaacacccuggucuggaaguacgcagacgccggccaugugugccaccugugccauccaaacugcaccuacggguccuaauaaaucuucacugucugacuuuagucucccacuaaaacugcauuuccuuucuacaauuucaauuucucccuuugcuucaaauaaaguccugacacuauucauuuga

SEQ ID NO: 1160 - RNA, 1595 nt, Homo sapiens
ccccggcgcagcgcggccgcagcagccuccgccccccgcacggugugagcgcccgacgcggccgaggcggccggagucccgagcuagccccggcggccgccgccgcccagaccggacgacaggccaccucgucggcguccgcccgaguccccgccucgccgccaacgccacaaccaccgcgcacggcccccugacuccguccaguauugaucgggagagccggagcgagcucuucggggagcagcgaugcgacccuccgggacggccggggcagcgcuccuggcgcugcuggcugcgcucugcccggcgagucgggcucuggaggaaaagaaaguuugccaaggcacgaguaacaagcucacgcaguugggcacuuuugaagaucauuuucucagccuccagaggauguucaauaacugugaggugguccuugggaauuuggaaauuaccuaugugcagaggaauuaugaucuuuccuucuuaaagaccauccaggagguggcugguuauguccucauugcccucaacacaguggagcgaauuccuuuggaaaaccugcagaucaucagaggaaauauguacuacgaaaauuccuaugccuuagcagucuuaucuaacuaugaugcaaauaaaaccggacugaaggagcugcccaugagaaauuuacaggaaauccugcauggcgccgugcgguucagcaacaacccugcccugugcaacguggagagcauccaguggcgggacauagucagcagugacuuucucagcaacaugucgauggacuuccagaaccaccugggcagcugccaaaagugugauccaagcugucccaaugggagcugcuggggugcaggagaggagaacugccagaaacugaccaaaaucaucugugcccagcagugcuccgggcgcugccguggcaagucccccagugacugcugccacaaccagugugcugcaggcugcacaggcccccgggagagcgacugccuggucugccgcaaauuccgagacgaagccacgugcaaggacaccugccccccacucaugcucuacaaccccaccacguaccagauggaugugaaccccgagggcaaauacagcuuuggugccaccugcgugaagaaguguccccguaauuauguggugacagaucacggcucgugcguccgagccuguggggccgacagcuaugagauggaggaagacggcguccgcaaguguaagaagugcgaagggccuugccgcaaaguguguaacggaauagguauuggugaauuuaaagacucacucuccauaaaugcuacgaauauuaaacacuucaaaaacugcaccuccaucaguggcgaucuccacauccugccgguggcauuuaggggugacuccuucacacauacuccuccucuggauccacaggaacuggauauucugaaaaccguaaaggaaaucacagguuugagcugaauuaucacaugaauauaaaugggaaaucaguguuuuagagagagaacuuuucgacauauuuccuguucccuuggaauaaaaacauuucuucugaaauuuuaccguuaaaaaaaaaaaaaaaaaaaaaaaaa

SEQ ID NO: 1161 - RNA, 2865 nt, Homo sapiens
ccccggcgcagcgcggccgcagcagccuccgccccccgcacggugugagcgcccgacgcggccgaggcggccggagucccgagcuagccccggcggccgccgccgcccagaccggacgacaggccaccucgucggcguccgcccgaguccccgccucgccgccaacgccacaaccaccgcgcacggcccccugacuccguccaguauugaucgggagagccggagcgagcucuucggggagcagcgaugcgacccuccgggacggccggggcagcgcuccuggcgcugcuggcugcgcucugcccggcgagucgggcucuggaggaaaagaaaguuugccaaggcacgaguaacaagcucacgcaguugggcacuuuugaagaucauuuucucagccuccagaggauguucaauaacugugaggugguccuugggaauuuggaaauuaccuaugugcagaggaauuaugaucuuuccuucuuaaagaccauccaggagguggcugguuauguccucauugcccucaacacaguggagcgaauuccuuuggaaaaccugcagaucaucagaggaaauauguacuacgaaaauuccuaugccuuagcagucuuaucuaacuaugaugcaaauaaaaccggacugaaggagcugcccaugagaaauuuacaggaaauccugcauggcgccgugcgguucagcaacaacccugcccugugcaacguggagagcauccaguggcgggacauagucagcagugacuuucucagcaacaugucgauggacuuccagaaccaccugggcagcugccaaaagugugauccaagcugucccaaugggagcugcuggggugcaggagaggagaacugccagaaacugaccaaaaucaucugugcccagcagugcuccgggcgcugccguggcaagucccccagugacugcugccacaaccagugugcugcaggcugcacaggcccccgggagagcgacugccuggucugccgcaaauuccgagacgaagccacgugcaaggacaccugccccccacucaugcucuacaaccccaccacguaccagauggaugugaaccccgagggcaaauacagcuuuggugccaccugcgugaagaaguguccccguaauuauguggugacagaucacggcucgugcguccgagccuguggggccgacagcuaugagauggaggaagacggcguccgcaaguguaagaagugcgaagggccuugccgcaaaguguguaacggaauagguauuggugaauuuaaagacucacucuccauaaaugcuacgaauauuaaacacuucaaaaacugcaccuccaucaguggcgaucuccacauccugccgguggcauuuaggggugacuccuucacacauacuccuccucuggauccacaggaacuggauauucugaaaaccguaaaggaaaucacaggguuuuugcugauucaggcuuggccugaaaacaggacggaccuccaugccuuugagaaccuagaaaucauacgcggcaggaccaagcaacauggucaguuuucucuugcagucgucagccugaacauaacauccuugggauuacgcucccucaaggagauaagugauggagaugugauaauuucaggaaacaaaaauuugugcuaugcaaauacaauaaacuggaaaaaacuguuugggaccuccggucagaaaaccaaaauuauaagcaacagaggugaaaacagcugcaaggccacaggccaggucugccaugccuugugcucccccgagggcugcuggggcccggagcccagggacugcgucucuugccggaaugucagccgaggcagggaaugcguggacaagugcaaccuucuggagggugagccaagggaguuuguggagaacucugagugcauacagugccacccagagugccugccucaggccaugaacaucaccugcacaggacggggaccagacaacuguauccagugugcccacuacauugacggcccccacugcgucaagaccugcccggcaggagucaugggagaaaacaacacccuggucuggaaguacgcagacgccggccaugugugccaccugugccauccaaacugcaccuacgggccaggaaaugagagucucaaagccauguuauucugccuuuuuaaacuaucauccuguaaucaaaguaaugauggcagcgugucccaccagagcgggagcccagcugcucaggagucaugcuuaggauggaucccuucucuucugccgucagaguuucagcuggguugggguggaugcagccaccuccaugccuggccuucugcaucugugaucaucacggccuccuccugccacugagccucaugccuucacgugucuguuccccccgcuuuuccuuucugccaccccugcacgugggccgccagguucccaagaguauccuacccauuuccuuccuuccacucccuuugccagugccucucaccccaacuaguagcuaaccaucacccccaggacugaccucuuccuccucgcugccagaugauuguucaaagcacagaauuugucagaaaccugcagggacuccaugcugccagccuucuccguaauuagcauggccccaguccaugcuucuagccuugguuccuucugccccucuguuugaaauucuagagccagcugugggacaauuaucugugucaaaagccagaugugaaaacaucucaauaacaaacuggcugcuuuguucaaugcuagaacaacgccugucacagaguagaaacucaaaaauauuugcugagugaaugaacaaaugaauaaaugcauaauaaauaauuaaccaccaauccaacauccaga

SEQ ID NO: 1162 - RNA, 4624 nt, Homo sapiens
ggaggagguggaggaggagggcugcuugaggaaguauaagaaugaaguugugaagcugagauuccccuccauugggaccggagaaaccaggggagccccccgggcagccgcgcgccccuucccacggggcccuuuacugcgccgcgcgcccggcccccaccccucgcagcaccccgcgccccgcgcccucccagccggguccagccggagccauggggccggagccgcagugagcaccauggagcuggcggccuugugccgcugggggcuccuccucgcccucuugccccccggagccgcgagcacccaagugugcaccggcacagacaugaagcugcggcucccugccagucccgagacccaccuggacaugcuccgccaccucuaccagggcugccagguggugcagggaaaccuggaacucaccuaccugcccaccaaugccagccuguccuuccugcaggauauccaggaggugcagggcuacgugcucaucgcucacaaccaagugaggcaggucccacugcagaggcugcggauugugcgaggcacccagcucuuugaggacaacuaugcccuggccgugcuagacaauggagacccgcugaacaauaccaccccugucacaggggccuccccaggaggccugcgggagcugcagcuucgaagccucacagagaucuugaaaggaggggucuugauccagcggaacccccagcucugcuaccaggacacgauuuuguggaaggacaucuuccacaagaacaaccagcuggcucucacacugauagacaccaaccgcucucgggccugccaccccuguucuccgauguguaagggcucccgcugcuggggagagaguucugaggauugucagagccugacgcgcacugucugugccgguggcugugcccgcugcaaggggccacugcccacugacugcugccaugagcagugugcugccggcugcacgggccccaagcacucugacugccuggccugccuccacuucaaccacaguggcaucugugagcugcacugcccagcccuggucaccuacaacacagacacguuugaguccaugcccaaucccgagggccgguauacauucggcgccagcugugugacugccugucccuacaacuaccuuucuacggacgugggauccugcacccucgucugcccccugcacaaccaagaggugacagcagaggauggaacacagcggugugagaagugcagcaagcccugugcccgagugugcuauggucugggcauggagcacuugcgagaggugagggcaguuaccagugccaauauccaggaguuugcuggcugcaagaagaucuuugggagccuggcauuucugccggagagcuuugauggggacccagccuccaacacugccccgcuccagccagagcagcuccaaguguuugagacucuggaagagaucacagguuaccuauacaucucagcauggccggacagccugccugaccucagcgucuuccagaaccugcaaguaauccggggacgaauucugcacaauggcgccuacucgcugacccugcaagggcugggcaucagcuggcuggggcugcgcucacugagggaacugggcaguggacuggcccucauccaccauaacacccaccucugcuucgugcacacggugcccugggaccagcucuuucggaacccgcaccaagcucugcuccacacugccaaccggccagaggacgagugugugggcgagggccuggccugccaccagcugugcgcccgagggcacugcugggguccagggcccacccagugugucaacugcagccaguuccuucggggccaggagugcguggaggaaugccgaguacugcaggggcuccccagggaguaugugaaugccaggcacuguuugccgugccacccugagugucagccccagaauggcucagugaccuguuuuggaccggaggcugaccaguguguggccugugcccacuauaaggacccucccuucugcguggcccgcugccccagcggugugaaaccugaccucuccuacaugcccaucuggaaguuuccagaugaggagggcgcaugccagccuugccccaucaacugcacccacuccuguguggaccuggaugacaagggcugccccgccgagcagagagccagcccucugacguccaucaucucugcggugguuggcauucugcuggucguggucuuggggguggucuuugggauccucaucaagcgacggcagcagaagauccggaaguacacgaugcggagacugcugcaggaaacggagcugguggagccgcugacaccuagcggagcgaugcccaaccaggcgcagaugcggauccugaaagagacggagcugaggaaggugaaggugcuuggaucuggcgcuuuuggcacagucuacaagggcaucuggaucccugauggggagaaugugaaaauuccaguggccaucaaaguguugagggaaaacacaucccccaaagccaacaaagaaaucuuagacgaagcauacgugauggcuggugugggcuccccauaugucucccgccuucugggcaucugccugacauccacggugcagcuggugacacagcuuaugcccuauggcugccucuuagaccauguccgggaaaaccgcggacgccugggcucccaggaccugcugaacugguguaugcagauugccaaggggaugagcuaccuggaggaugugcggcucguacacagggacuuggccgcucggaacgugcuggucaagagucccaaccaugucaaaauuacagacuucgggcuggcucggcugcuggacauugacgagacagaguaccaugcagaugggggcaaggugcccaucaaguggauggcgcuggaguccauucuccgccggcgguucacccaccagagugauguguggaguuauggugugacugugugggagcugaugacuuuuggggccaaaccuuacgaugggaucccagcccgggagaucccugaccugcuggaaaagggggagcggcugccccagccccccaucugcaccauugaugucuacaugaucauggucaaauguuggaugauugacucugaaugucggccaagauuccgggaguuggugucugaauucucccgcauggccagggacccccagcgcuuuguggucauccagaaugaggacuugggcccagccagucccuuggacagcaccuucuaccgcucacugcuggaggacgaugacaugggggaccugguggaugcugaggaguaucugguaccccagcagggcuucuucuguccagacccugccccgggcgcugggggcaugguccaccacaggcaccgcagcucaucuaccaggaguggcgguggggaccugacacuagggcuggagcccucugaagaggaggcccccaggucuccacuggcacccuccgaaggggcuggcuccgauguauuugauggugaccugggaaugggggcagccaaggggcugcaaagccuccccacacaugaccccagcccucuacagcgguacagugaggaccccacaguaccccugcccucugagacugauggcuacguugccccccugaccugcagcccccagccugaauaugugaaccagccagauguucggccccagcccccuucgccccgagagggcccucugccugcugcccgaccugcuggugccacucuggaaaggcccaagacucucuccccagggaagaauggggucgucaaagacguuuuugccuuugggggugccguggagaaccccgaguacuugacaccccagggaggagcugccccucagccccacccuccuccugccuucagcccagccuucgacaaccucuauuacugggaccaggacccaccagagcggggggcuccacccagcaccuucaaagggacaccuacggcagagaacccagaguaccugggucuggacgugccagugugaaccagaaggccaaguccgcagaagcccugauguguccucagggagcagggaaggccugacuucugcuggcaucaagaggugggagggcccuccgaccacuuccaggggaaccugccaugccaggaaccuguccuaaggaaccuuccuuccugcuugaguucccagauggcuggaagggguccagccucguuggaagaggaacagcacuggggagucuuuguggauucugaggcccugcccaaugagacucuaggguccaguggaugccacagcccagcuuggcccuuuccuuccagauccuggguacugaaagccuuagggaagcuggccugagaggggaagcggcccuaagggagugucuaagaacaaaagcgacccauucagagacugucccugaaaccuaguacugccccccaugaggaaggaacagcaauggugucaguauccaggcuuuguacagagugcuuuucuguuuaguuuuuacuuuuuuuguuuuguuuuuuuaaagaugaaauaaagacccagggggagaauggguguuguauggggaggcaagugugggggguccuucuccacacccacuuuguccauuugcaaauauauuuuggaaaacagcua

SEQ ID NO: 1163 - RNA, 4816 nt, Homo sapiens
guucccggauuuuugugggcgccugccccgccccucgucccccugcuguguccauauaucgaggcgauaggguuaagggaaggcggacgccugauggguuaaugagcaaacugaaguguuuuccaugaucuuuuuugagucgcaauugaaguaccaccucccgagggugauugcuuccccaugcgggguagaaccuuugcuguccuguucaccacucuaccuccagcacagaauuuggcuuaugccuacucaaugugaagaugaugaggaugaaaaccuuugugaugauccacuuccacuuaaugaaugguggcaaagcaaagcuauauucaagaccacaugcaaagcuacucccugagcaaagagucacagauaaaacgggggcaccaguagaauggccaggacaaacgcagugcagcacagagacucagacccuggcagccaugccugcgcaggcagugaugagagugacauguacuguuguggacaugcacaaaagugagugugcaccggcacagacaugaagcugcggcucccugccagucccgagacccaccuggacaugcuccgccaccucuaccagggcugccagguggugcagggaaaccuggaacucaccuaccugcccaccaaugccagccuguccuuccugcaggauauccaggaggugcagggcuacgugcucaucgcucacaaccaagugaggcaggucccacugcagaggcugcggauugugcgaggcacccagcucuuugaggacaacuaugcccuggccgugcuagacaauggagacccgcugaacaauaccaccccugucacaggggccuccccaggaggccugcgggagcugcagcuucgaagccucacagagaucuugaaaggaggggucuugauccagcggaacccccagcucugcuaccaggacacgauuuuguggaaggacaucuuccacaagaacaaccagcuggcucucacacugauagacaccaaccgcucucgggccugccaccccuguucuccgauguguaagggcucccgcugcuggggagagaguucugaggauugucagagccugacgcgcacugucugugccgguggcugugcccgcugcaaggggccacugcccacugacugcugccaugagcagugugcugccggcugcacgggccccaagcacucugacugccuggccugccuccacuucaaccacaguggcaucugugagcugcacugcccagcccuggucaccuacaacacagacacguuugaguccaugcccaaucccgagggccgguauacauucggcgccagcugugugacugccugucccuacaacuaccuuucuacggacgugggauccugcacccucgucugcccccugcacaaccaagaggugacagcagaggauggaacacagcggugugagaagugcagcaagcccugugcccgagugugcuauggucugggcauggagcacuugcgagaggugagggcaguuaccagugccaauauccaggaguuugcuggcugcaagaagaucuuugggagccuggcauuucugccggagagcuuugauggggacccagccuccaacacugccccgcuccagccagagcagcuccaaguguuugagacucuggaagagaucacagguuaccuauacaucucagcauggccggacagccugccugaccucagcgucuuccagaaccugcaaguaauccggggacgaauucugcacaauggcgccuacucgcugacccugcaagggcugggcaucagcuggcuggggcugcgcucacugagggaacugggcaguggacuggcccucauccaccauaacacccaccucugcuucgugcacacggugcccugggaccagcucuuucggaacccgcaccaagcucugcuccacacugccaaccggccagaggacgagugugugggcgagggccuggccugccaccagcugugcgcccgagggcacugcugggguccagggcccacccagugugucaacugcagccaguuccuucggggccaggagugcguggaggaaugccgaguacugcaggggcuccccagggaguaugugaaugccaggcacuguuugccgugccacccugagugucagccccagaauggcucagugaccuguuuuggaccggaggcugaccaguguguggccugugcccacuauaaggacccucccuucugcguggcccgcugccccagcggugugaaaccugaccucuccuacaugcccaucuggaaguuuccagaugaggagggcgcaugccagccuugccccaucaacugcacccacuccuguguggaccuggaugacaagggcugccccgccgagcagagagccagcccucugacguccaucaucucugcggugguuggcauucugcuggucguggucuuggggguggucuuugggauccucaucaagcgacggcagcagaagauccggaaguacacgaugcggagacugcugcaggaaacggagcugguggagccgcugacaccuagcggagcgaugcccaaccaggcgcagaugcggauccugaaagagacggagcugaggaaggugaaggugcuuggaucuggcgcuuuuggcacagucuacaagggcaucuggaucccugauggggagaaugugaaaauuccaguggccaucaaaguguugagggaaaacacaucccccaaagccaacaaagaaaucuuagacgaagcauacgugauggcuggugugggcuccccauaugucucccgccuucugggcaucugccugacauccacggugcagcuggugacacagcuuaugcccuauggcugccucuuagaccauguccgggaaaaccgcggacgccugggcucccaggaccugcugaacugguguaugcagauugccaaggggaugagcuaccuggaggaugugcggcucguacacagggacuuggccgcucggaacgugcuggucaagagucccaaccaugucaaaauuacagacuucgggcuggcucggcugcuggacauugacgagacagaguaccaugcagaugggggcaaggugcccaucaaguggauggcgcuggaguccauucuccgccggcgguucacccaccagagugauguguggaguuauggugugacugugugggagcugaugacuuuuggggccaaaccuuacgaugggaucccagcccgggagaucccugaccugcuggaaaagggggagcggcugccccagccccccaucugcaccauugaugucuacaugaucauggucaaauguuggaugauugacucugaaugucggccaagauuccgggaguuggugucugaauucucccgcauggccagggacccccagcgcuuuguggucauccagaaugaggacuugggcccagccagucccuuggacagcaccuucuaccgcucacugcuggaggacgaugacaugggggaccugguggaugcugaggaguaucugguaccccagcagggcuucuucuguccagacccugccccgggcgcugggggcaugguccaccacaggcaccgcagcucaucuaccaggaguggcgguggggaccugacacuagggcuggagcccucugaagaggaggcccccaggucuccacuggcacccuccgaaggggcuggcuccgauguauuugauggugaccugggaaugggggcagccaaggggcugcaaagccuccccacacaugaccccagcccucuacagcgguacagugaggaccccacaguaccccugcccucugagacugauggcuacguugccccccugaccugcagcccccagccugaauaugugaaccagccagauguucggccccagcccccuucgccccgagagggcccucugccugcugcccgaccugcuggugccacucuggaaaggcccaagacucucuccccagggaagaauggggucgucaaagacguuuuugccuuugggggugccguggagaaccccgaguacuugacaccccagggaggagcugccccucagccccacccuccuccugccuucagcccagccuucgacaaccucuauuacugggaccaggacccaccagagcggggggcuccacccagcaccuucaaagggacaccuacggcagagaacccagaguaccugggucuggacgugccagugugaaccagaaggccaaguccgcagaagcccugauguguccucagggagcagggaaggccugacuucugcuggcaucaagaggugggagggcccuccgaccacuuccaggggaaccugccaugccaggaaccuguccuaaggaaccuuccuuccugcuugaguucccagauggcuggaagggguccagccucguuggaagaggaacagcacuggggagucuuuguggauucugaggcccugcccaaugagacucuaggguccaguggaugccacagcccagcuuggcccuuuccuuccagauccuggguacugaaagccuuagggaagcuggccugagaggggaagcggcccuaagggagugucuaagaacaaaagcgacccauucagagacugucccugaaaccuaguacugccccccaugaggaaggaacagcaauggugucaguauccaggcuuuguacagagugcuuuucuguuuaguuuuuacuuuuuuuguuuuguuuuuuuaaagaugaaauaaagacccagggggagaauggguguuguauggggaggcaagugugggggguccuucuccacacccacuuuguccauuugcaaauauauuuuggaaaacagcua

SEQ ID NO: 1164 - RNA, 5511 nt, Homo sapiens
acacacacacaccccuccccugccaucccuccccggacuccggcuccggcuccgauugcaauuugcaaccuccgcugccgucgccgcagcagccaccaauucgccagcgguucagguggcucuugccucgauguccuagccuaggggcccccgggccggacuuggcugggcucccuucacccucugcggagucaugagggcgaacgacgcucugcaggugcugggcuugcuuuucagccuggcccggggcuccgaggugggcaacucucaggcaguguguccugggacucugaauggccugagugugaccggcgaugcugagaaccaauaccagacacuguacaagcucuacgagaggugugagguggugauggggaaccuugagauugugcucacgggacacaaugccgaccucuccuuccugcaguggauucgagaagugacaggcuauguccucguggccaugaaugaauucucuacucuaccauugcccaaccuccgcguggugcgagggacccaggucuacgaugggaaguuugccaucuucgucauguugaacuauaacaccaacuccagccacgcucugcgccagcuccgcuugacucagcucaccgagauucugucaggggguguuuauauugagaagaacgauaagcuuugucacauggacacaauugacuggagggacaucgugagggaccgagaugcugagauaguggugaaggacaauggcagaagcuguccccccugucaugagguuugcaaggggcgaugcugggguccuggaucagaagacugccagacauugaccaagaccaucugugcuccucaguguaauggucacugcuuugggcccaaccccaaccagugcugccaugaugagugugccgggggcugcucaggcccucaggacacagacugcuuugccugccggcacuucaaugacaguggagccuguguaccucgcuguccacagccucuugucuacaacaagcuaacuuuccagcuggaacccaauccccacaccaaguaucaguauggaggaguuuguguagccagcuguccccauaacuuugugguggaucaaacauccugugucagggccuguccuccugacaagauggaaguagauaaaaaugggcucaagaugugugagccuugugggggacuaugucccaaagccugugagggaacaggcucugggagccgcuuccagacuguggacucgagcaacauugauggauuugugaacugcaccaagauccugggcaaccuggacuuucugaucaccggccucaauggagaccccuggcacaagaucccugcccuggacccagagaagcucaaugucuuccggacaguacgggagaucacagguuaccugaacauccaguccuggccgccccacaugcacaacuucaguguuuuuuccaauuugacaaccauuggaggcagaagccucuacaaccggggcuucucauuguugaucaugaagaacuugaaugucacaucucugggcuuccgaucccugaaggaaauuagugcugggcguaucuauauaagugccaauaggcagcucugcuaccaccacucuuugaacuggaccaaggugcuucgggggccuacggaagagcgacuagacaucaagcauaaucggccgcgcagagacugcguggcagagggcaaagugugugacccacugugcuccucugggggaugcuggggcccaggcccuggucagugcuuguccugucgaaauuauagccgaggaggugucugugugacccacugcaacuuucugaauggggagccucgagaauuugcccaugaggccgaaugcuucuccugccacccggaaugccaacccauggagggcacugccacaugcaauggcucgggcucugauacuugugcucaaugugcccauuuucgagaugggccccacugugugagcagcugcccccauggaguccuaggugccaagggcccaaucuacaaguacccagauguucagaaugaaugucggcccugccaugagaacugcacccagggguguaaaggaccagagcuucaagacuguuuaggacaaacacuggugcugaucggcaaaacccaucugacaauggcuuugacagugauagcaggauugguagugauuuucaugaugcugggcggcacuuuucucuacuggcgugggcgccggauucagaauaaaagggcuaugaggcgauacuuggaacggggugagagcauagagccucuggaccccagugagaaggcuaacaaagucuuggccagaaucuucaaagagacagagcuaaggaagcuuaaagugcuuggcucgggugucuuuggaacugugcacaaaggaguguggaucccugagggugaaucaaucaagauuccagucugcauuaaagucauugaggacaagaguggacggcagaguuuucaagcugugacagaucauaugcuggccauuggcagccuggaccaugcccacauuguaaggcugcugggacuaugcccagggucaucucugcagcuugucacucaauauuugccucuggguucucugcuggaucaugugagacaacaccggggggcacuggggccacagcugcugcucaacuggggaguacaaauugccaagggaauguacuaccuugaggaacaugguauggugcauagaaaccuggcugcccgaaacgugcuacucaagucacccagucagguucagguggcagauuuugguguggcugaccugcugccuccugaugauaagcagcugcuauacagugaggccaagacuccaauuaaguggauggcccuugagaguauccacuuugggaaauacacacaccagagugaugucuggagcuauggugugacaguuugggaguugaugaccuucggggcagagcccuaugcagggcuacgauuggcugaaguaccagaccugcuagagaagggggagcgguuggcacagccccagaucugcacaauugaugucuacauggugauggucaaguguuggaugauugaugagaacauucgcccaaccuuuaaagaacuagccaaugaguucaccaggauggcccgagacccaccacgguaucuggucauaaagagagagagugggccuggaauagccccugggccagagccccauggucugacaaacaagaagcuagaggaaguagagcuggagccagaacuagaccuagaccuagacuuggaagcagaggaggacaaccuggcaaccaccacacugggcuccgcccucagccuaccaguuggaacacuuaaucggccacgugggagccagagccuuuuaaguccaucaucuggauacaugcccaugaaccaggguaaucuuggggagucuugccaggagucugcaguuucugggagcagugaacggugcccccguccagucucucuacacccaaugccacggggaugccuggcaucagagucaucagaggggcauguaacaggcucugaggcugagcuccaggagaaagugucaauguguaggagccggagcaggagccggagcccacggccacgcggagauagcgccuaccauucccagcgccacagucugcugacuccuguuaccccacucuccccacccggguuagaggaagaggaugucaacgguuaugucaugccagauacacaccucaaagguacucccuccucccgggaaggcacccuuucuucagugggucucaguucuguccuggguacugaagaagaagaugaagaugaggaguaugaauacaugaaccggaggagaaggcacaguccaccucaucccccuaggccaaguucccuugaggagcuggguuaugaguacauggauguggggucagaccucagugccucucugggcagcacacagaguugcccacuccacccuguacccaucaugcccacugcaggcacaacuccagaugaagacuaugaauauaugaaucggcaacgagauggaggugguccugggggugauuaugcagccaugggggccugcccagcaucugagcaaggguaugaagagaugagagcuuuucaggggccuggacaucaggccccccauguccauuaugcccgccuaaaaacucuacguagcuuagaggcuacagacucugccuuugauaacccugauuacuggcauagcaggcuuuuccccaaggcuaaugcccagagaacguaacuccugcucccuguggcacucagggagcauuuaauggcagcuagugccuuuagaggguaccgucuucucccuauucccucucucucccaggucccagccccuuuuccccagucccagacaauuccauucaaucuuuggaggcuuuuaaacauuuugacacaaaauucuuaugguauguagccagcugugcacuuucuucucuuucccaaccccaggaaagguuuuccuuauuuugugugcuuucccagucccauuccucagcuucuucacaggcacuccuggagauaugaaggauuacucuccauaucccuuccucucaggcucuugacuacuuggaacuaggcucuuaugugugccuuuguuucccaucagacugucaagaagaggaaagggaggaaaccuagcagaggaaaguguaauuuugguuuaugacucuuaacccccuagaaagacagaagcuuaaaaucugugaagaaagagguuaggaguagauauugauuacuaucauaauucagcacuuaacuaugagccaggcaucauacuaaacuucaccuacauuaucucacuuaguccuuuaucauccuuaaaacaauucugugacauacauauuaucucauuuuacacaaagggaagucgggcaugguggcucaugccuguaaucucagcacuuugggaggcugaggcagaaggauuaccugaggcaaggaguuugagaccagcuuagccaacauaguaagacccccaucucuuuaaaaaaaaaaaaaaaaaaaaaaaaaaaacuuuagaacugggugcaguggcucaugccuguaaucccagccagcacuuugggaggcugagaugggaagaucacuugagcccagaauuagagauaagccuauggaaacauagcaagacacugucucuacaggggaaaaaaaaaaaagaaacugagccuuaaagagaugaaauaaauuaagcaguagauccaggaugcaaaauccucccaauuccugugcaugugcucuuauuguaaggugccaagaaaaacugauuuaaguuacagcccuuguuuaaggggcacuguuucuuguuuuugcacugaaucaagucuaaccccaacagccacauccuccuauaccuagacaucucaucucaggaaguggugguggggguagucagaaggaaaaauaacuggacaucuuuguguaaaccauaauccacaugugccguaaaugaucuucacuccuuauccgagggcaaauucacaaggauccccaagauccacuuuuagaagccauucucaucca

SEQ ID NO: 1165 - RNA, 1050 nt, Homo sapiens
acacacacacaccccuccccugccaucccuccccggacuccggcuccggcuccgauugcaauuugcaaccuccgcugccgucgccgcagcagccaccaauucgccagcgguucagguggcucuugccucgauguccuagccuaggggcccccgggccggacuuggcugggcucccuucacccucugcggagucaugagggcgaacgacgcucugcaggugcugggcuugcuuuucagccuggcccggggcuccgaggugggcaacucucaggcaguguguccugggacucugaauggccugagugugaccggcgaugcugagaaccaauaccagacacuguacaagcucuacgagaggugugagguggugauggggaaccuugagauugugcucacgggacacaaugccgaccucuccuuccugcaguggauucgagaagugacaggcuauguccucguggccaugaaugaauucucuacucuaccauugcccaaccuccgcguggugcgagggacccaggucuacgaugggaaguuugccaucuucgucauguugaacuauaacaccaacuccagccacgcucugcgccagcuccgcuugacucagcucaccggucaguucccgaugguuccuucuggccucaccccucagccagcccaagacugguaccuccuugaugaugacccaagacugcucacucuaagugccucuuccaaggugccugucaccuuggccgcugucuaaagguccauugcucccuaagcaauagagggcccccaguagggggagcuaggggcaucugcuccagggaaaggaacccuguguccuuguggggcuggagucagagcuggaucuguuaaccguuuuucuaauuucaaaguacaguguaccggaggccaggccugauggcuuacaccuguaaucccagcauuuugggaggccaaggagggcagaucacuugagaucaggaguuugagaccagccuggccaacauggcgaaacccugucucuacuaaaaauacaaaaaaauaaaauaaaauaaaaaauua

SEQ ID NO: 1166 - RNA, 11941 nt, Homo sapiens
cacgcgcgcccggcugggggaucuccuccgcgugcccgaaagggggauaugccauuuggacauguaauugucagcacgggaucugagacuuccaaaaaaugaagccggcgacaggacuuugggucugggugagccuucucguggcggcggggaccguccagcccagcgauucucagucagugugugcaggaacggagaauaaacugagcucucucucugaccuggaacagcaguaccgagccuugcgcaaguacuaugaaaacugugagguugucaugggcaaccuggagauaaccagcauugagcacaaccgggaccucuccuuccugcggucuguucgagaagucacaggcuacguguuaguggcucuuaaucaguuucguuaccugccucuggagaauuuacgcauuauucgugggacaaaacuuuaugaggaucgauaugccuuggcaauauuuuuaaacuacagaaaagauggaaacuuuggacuucaagaacuuggauuaaagaacuugacagaaauccuaaaugguggagucuauguagaccagaacaaauuccuuuguuaugcagacaccauucauuggcaagauauuguucggaacccauggccuuccaacuugacucuugugucaacaaaugguaguucaggauguggacguugccauaaguccuguacuggccguugcuggggacccacagaaaaucauugccagacuuugacaaggacggugugugcagaacaaugugacggcagaugcuacggaccuuacgucagugacugcugccaucgagaaugugcuggaggcugcucaggaccuaaggacacagacugcuuugccugcaugaauuucaaugacaguggagcauguguuacucaguguccccaaaccuuugucuacaauccaaccaccuuucaacuggagcacaauuucaaugcaaaguacacauauggagcauucugugucaagaaauguccacauaacuuugugguagauuccaguucuugugugcgugccugcccuaguuccaagauggaaguagaagaaaaugggauuaaaauguguaaaccuugcacugacauuugcccaaaagcuugugauggcauuggcacaggaucauugaugucagcucagacuguggauuccaguaacauugacaaauucauaaacuguaccaagaucaaugggaauuugaucuuucuagucacugguauucauggggacccuuacaaugcaauugaagccauagacccagagaaacugaacgucuuucggacagucagagagauaacagguuuccugaacauacagucauggccaccaaacaugacugacuucaguguuuuuucuaaccuggugaccauugguggaagaguacucuauaguggccuguccuugcuuauccucaagcaacagggcaucaccucucuacaguuccagucccugaaggaaaucagcgcaggaaacaucuauauuacugacaacagcaaccuguguuauuaucauaccauuaacuggacaacacucuucagcacaaucaaccagagaauaguaauccgggacaacagaaaagcugaaaauuguacugcugaaggaauggugugcaaccaucuguguuccagugauggcuguuggggaccugggccagaccaaugucugucgugucgccgcuucaguagaggaaggaucugcauagagucuuguaaccucuaugauggugaauuucgggaguuugagaauggcuccaucuguguggagugugacccccagugugagaagauggaagauggccuccucacaugccauggaccggguccugacaacuguacaaagugcucucauuuuaaagauggcccaaacuguguggaaaaauguccagauggcuuacagggggcaaacaguuucauuuucaaguaugcugauccagaucgggagugccacccaugccauccaaacugcacccaaggguguaacggucccacuagucaugacugcauuuacuacccauggacgggccauuccacuuuaccacaacaugcuagaacuccccugauugcagcuggaguaauuggugggcucuucauucuggucauugugggucugacauuugcuguuuauguuagaaggaagagcaucaaaaagaaaagagccuugagaagauucuuggaaacagaguugguggaaccauuaacucccaguggcacagcacccaaucaagcucaacuucguauuuugaaagaaacugagcugaagaggguaaaaguccuuggcucaggugcuuuuggaacgguuuauaaagguauuuggguaccugaaggagaaacugugaagauuccuguggcuauuaagauucuuaaugagacaacuggucccaaggcaaauguggaguucauggaugaagcucugaucauggcaaguauggaucauccacaccuaguccgguugcugggugugugucugagcccaaccauccagcugguuacucaacuuaugccccauggcugccuguuggaguauguccacgagcacaaggauaacauuggaucacaacugcugcuuaacugguguguccagauagcuaagggaaugauguaccuggaagaaagacgacucguucaucgggauuuggcagcccguaaugucuuagugaaaucuccaaaccaugugaaaaucacagauuuugggcuagccagacucuuggaaggagaugaaaaagaguacaaugcugauggaggaaagaugccaauuaaauggauggcucuggaguguauacauuacaggaaauucacccaucagagugacguuuggagcuauggaguuacuauaugggaacugaugaccuuuggaggaaaacccuaugauggaauuccaacgcgagaaaucccugauuuauuagagaaaggagaacguuugccucagccucccaucugcacuauugacguuuacauggucauggucaaauguuggaugauugaugcugacaguagaccuaaauuuaaggaacuggcugcugaguuuucaaggauggcucgagacccucaaagauaccuaguuauucagggugaugaucguaugaagcuucccaguccaaaugacagcaaguucuuucagaaucucuuggaugaagaggauuuggaagauaugauggaugcugaggaguacuuggucccucaggcuuucaacaucccaccucccaucuauacuuccagagcaagaauugacucgaauaggagugaaauuggacacagcccuccuccugccuacacccccaugucaggaaaccaguuuguauaccgagauggagguuuugcugcugaacaaggagugucugugcccuacagagccccaacuagcacaauuccagaagcuccuguggcacagggugcuacugcugagauuuuugaugacuccugcuguaauggcacccuacgcaagccaguggcaccccauguccaagaggacaguagcacccagagguacagugcugaccccaccguguuugccccagaacggagcccacgaggagagcuggaugaggaagguuacaugacuccuaugcgagacaaacccaaacaagaauaccugaauccaguggaggagaacccuuuuguuucucggagaaaaaauggagaccuucaagcauuggauaaucccgaauaucacaaugcauccaaugguccacccaaggccgaggaugaguaugugaaugagccacuguaccucaacaccuuugccaacaccuugggaaaagcugaguaccugaagaacaacauacugucaaugccagagaaggccaagaaagcguuugacaacccugacuacuggaaccacagccugccaccucggagcacccuucagcacccagacuaccugcaggaguacagcacaaaauauuuuuauaaacagaaugggcggauccggccuauuguggcagagaauccugaauaccucucugaguucucccugaagccaggcacugugcugccgccuccaccuuacagacaccggaauacugugguguaagcucaguugugguuuuuuagguggagagacacaccugcuccaauuuccccaccccccucucuuucucugguggucuuccuucuaccccaaggccaguaguuuugacacuucccaguggaagauacagagaugcaaugauaguuaugugcuuaccuaacuugaacauuagagggaaagacugaaagagaaagauaggaggaaccacaauguuucuucauuucucugcauggguuggucaggagaaugaaacagcuagagaaggaccagaaaauguaaggcaaugcugccuacuaucaaacuagcugucacuuuuuuucuuuuucuuuuucuuucuuuguuucuuucuuccucuucuuuuuuuuuuuuuuuuuuaaagcagaugguugaaacacccaugcuaucuguuccuaucugcaggaacugaugugugcauauuuagcaucccuggaaaucauaauaaaguuuccauuagaacaaaagaauaacauuuucuauaacauaugauggugucugaaauugagaauccaguuucuuuccccagcaguuucuguccuagcaaguaagaauggccaacucaacuuucauaauuuaaaaaucuccauuaaaguuauaacuaguaauuauguuuucaacacuuuuugguuuuuuucauuuuguuuugcucugaccgauuccuuuauauuugcuccccuauuuuuggcuuuaauuucuaauugcaaagauguuuacaucaaagcuucuucacagaauuuaagcaagaaauauuuuaauauagugaaauggccacuacuuuaaguauacaaucuuuaaaauaagaaagggaggcuaauauuuuucaugcuaucaaauuaucuucacccucauccuuuacauuuuucaacauuuuuuuuucuccauaaaugacacuacuugauaggccguugguugucugaagaguagaagggaaacuaagagacaguucucugugguucaggaaaacuacugauacuuucagggguggcccaaugagggaauccauugaacuggaagaaacacacuggauuggguaugucuaccuggcagauacucagaaauguaguuugcacuuaagcuguaauuuuauuuguucuuuuucugaacuccauuuuggauuuugaaucaagcaauauggaagcaaccagcaaauuaacuaauuuaaguacauuuuuaaaaaaagagcuaagauaaagacuguggaaaugccaaaccaagcaaauuaggaaccuugcaacgguauccagggacuaugaugagaggccagcacauuaucuucauaugucaccuuugcuacgcaaggaaauuuguucaguucguauacuucguaagaaggaaugcgaguaaggauuggcuugaauuccauggaauuucuaguaugagacuauuuauaugaaguagaagguaacucuuugcacauaaauugguauaauaaaaagaaaaacacaaacauucaaagcuuagggauagguccuugggucaaaaguuguaaauaaaugugaaacaucuucucaugcaauuauuuuauuauccaacacacuaaucuuuugauacuuuauauaauucccuuucuucauauacugcauccaguacuagaaccaucauuauuauguaucauuuugaaagaauaccugaugagaugaaggaugagaacaaaugacagagaugagucuccaaguaaagggggccucacaucaauaauuaggaaacuuagauauaagucgcccuuuucugaaaauucuaccccaagucauuuagauuuuuaaaaaauauuucuaauguuaaaauauugggaccaaauuagaaucaauaguauaagauuaauuaauuagaguaaaaauaucuauuaaggcagagaaaguuuagagaaaaaaauccaaagaaauuuguguuucuuccuauucugaacaaguaaauccauccauccauccauccaaaccuccuuuaucuaacugugucuacuaaaagcaccauguuuuguggggaacacucagauaaauggaauaucauccucaacuucaaaauucuaugaucuaggagauuuaauuaaaaugacauuuuaauuuuucuaugcguuccaacaaucagauugcauagucucuuuugugaauagcugucauauaaucaguuguacuguaagauaucuccuuuaaacucauuugggauauaaguuaaacauccuucaaauuguugauguugacaaacaggauaauuucaauaauauuauucaaacauaaacuggucuaggagaauauugcaucacugacuaauuagccuaucuagagucuaacuucaccauuaaaccaaaagcagauggugguccuuggccaagaauauuggagacauuggaguugguuuuuuucuaagcuauaagaagugaggcgagcugaaaaaguaugguagagcaggagaaggguuugugagauuccuucuagugaaguucacccucaaacuuuucagggguaaagacacagagugauucaggggccacaaucuaauagcucagggcucuccuauccauucagagaagucucuaggaaaagggaucucauaucaguacuuaugaaaaauugaauauaagccucccuuucuaaauaaaucugcaucgagucaucacagcccucuuuuuggauacuauaccuugauuuuuuuuuucugauuuacaauaugcauaugguuucuacugggcuauagaaagcagaaucacucauuuuggagaaggaaaaaaugaauaguuaaaacaaacuuuuaacuguuaagguaacagaaauguauuuagugaaugucucuuuccuccuaagaacacaagacuucuacauguuggguaauaccuagagaugcauguaggaauaauccaaaaugacccaaaugcuuuauaauagcaccacuuuauaauucuuuugaaugauuucuguaguauauaauugacuucaguuguuugaguguuuuuuguuuuauuuuuguccccccugggaaaacauauuucagcauguauaagagggagaaaaaaaguuucauuccuuccagagaauaacuuauuuaguccaguaggguagaauuuuaaaaugucaguuaaagucuucaaagugcuuggggggauaucagauuccagaggccaauuguagcaauugaaauuugcagaaucaauuauguaaaucugagacaaauuaguauuaaaauuacacggaguauauuuuuuaaaucacccaacuuuguagauuauaccuauuuugggcagguauggaaaaauuuugcaguuaaaugauugccuaaagaaagugguaaacaggugaggaaagauggccucugaucuaggauagauccagaaccacaaagcaucugcaccacaaaagguguuagacuaccaagcagcuccugguuuucugcauaguauuaguagcacagcuuaggaugagaauccuuucuccaguaacauucuuaaaauagcaugaaaaacaacgcaaaacucaaauuucuauuaaaacacacaaacuaaaaucaagugauucuuuuuuguagauuagggagaaggacugaauaucuaauuuaagagaaggaauaguguuuaaguguuauagugugugagcuaauaccuucuaaaggaaagacauggcaugaagauugugcauacuuacaaugcuaaggaaaaaucaagaaaaggacugugugaggcucugcuacuagaugaaguuggaaggacuauuaaugugcuucuugaaguaucaaaaaugaaaagaaaauuaaaauuguuuaagccugacagggaaggauguaaauacaaguuuuucuagagcucucuaaccuuuauuucaaaacuggaauuauucauccaucuguaauuguugauaauuuaacuaguauauguaguucauaagguaauagaaaaggugaucaugaaagcauguauauaacuggacagaaccacgauaaugcuauaagauguagauuuaguuagguuaucagauguuaaaugauuuuaauauuauuaaauaaaucaaacuagaaaacuaaccacaaguauaauguaacaaaguuaaaugcaggauauaaaaauguaggauggauuuugcauaguaaaaagauaaguuugccauuuaaaauuguuguuuguuggguuuagcugaaaguaggcauauaugguuccacuugggaaaacuugcuuuaaagcauuacaaugaacaauuuuuucucauucucuuauuccuuuaucacuuuuuaaauguaaagaaaauuguauuuauuuauuuuuuuaaauaaacaccaccuugcagaauuuaauaggcaaacauguuacauaugacuaaguaagggucuucaagaugaaguaaagaaaauguaaauguucuauuaccuuaugcagagacaaaaaaaaaaaggaguggugucauuuagcuagcaaacaaacaaaauacaguuaauuggugauauguccuuucuuuucucacuaugcccucuugccuccaaaaaugacaacaaagaaucacaauuuuucugauaaauaaaugcuaaaccaagcguuucaaacuauugcauugccauucuuuuggacuuuaguuauuagaaugaugauuguuauagggcaaaugagaaauccaugugcaucagcuucuaguuguuaaaaaaaccagauaaauuaacuucuacuguauacugugggcagaggauccuagagcugauccuacaacaucagcuucuaguuguuaaaaaaaaaaaaagaaacagauaaauuaacuucuacuguauauacugugggcagaggaucuuacugugccucuguuuguguacauggacuucgguguguaucaguuugaaggacagccuugccccauguaaacauauaaaugcagauugguaucgccugguugcuauuugcuuaagaacaaauauuauacagaugagaucaggcauaauuuuaaaagaucauuaucaguggagaccucauuauuacugauauuacaauggggccaguuuuuauacuucuggguagaauuaauaaaauuuuucugaucccagagaucugaguucucucugcaguuggaaacaagaagcuguugugggcauugugucgggccaggggcccuuguguuugugugggcaaauaucuuuuagcagugugagcugcuuuuuucuuuucauuaaaagucucucuaaaauaauagaaauuucagauacucgguucaagucucacugauuuuguagagguccaaaaauguaggaucugucacuuuugcaggccccugccucaccuaauuccuggccaggugacauuuugggcagaaguaaaugcuucuauagucacaagcuaaaaugacucuaagccccaauuucacgggggguauucacaugcuuccucuggaaaauacucuuugacagucagcuuugcaaguaagugauuaccuuguuaggaaucaaagaaaaauguauuucucucugaccuuuagaggaaaauagaauccuucccuuuuuugcccauugacacaacuggcacugcucucuucccuuucuaccacccugguucaaaguagucccccgaugcuguccuguuccuuucuuaagccauaguggaucucugagauccuacaccccacuuugugaaacacugacuucaucuuugcccucgaaugccugauuuuuucauaagagauucuagcaauuuggacacuguuuaagugaacuaucaaacuaccgcauagagaauauuuaagcuauuaaaauuaugguuucccaugaagaucaauucucuguguccuucccuauaggaauuugagacgaguuagcccugugaugaaucuugaaacucacauauguccacauacacuugguagaacuucgauuuaaucuuuacauaaaagcuguacauauaaccaagaaguuauuuuugccaguaaauuaacuuauuugcuuuauucaucuuauuugguuccuaaucguaaauauuuuguagcugcuguaaauuuuuuucucccaaaugaggagucuuauuaucauaaagguaaaggcuauucagcuuugauaaccaccugcaauucuuuuuuggaucauucauccaucuaacaaauacauaaugaggacaguucauguuaaugaaaauccauguuguuuaauagaaugccauccuuuaccuacuuuugcucuuuauggacguuuuucuuuucaugcucuagugagcuuucccuauaucaugagaagugguuauauuugugcaaauauacaaauauaggaaaacaaagauucauaccuguaggcaauagucuaacuuguccaaaccacuuugccuuuacugcuauuuuuauccccaaugcguagauauuucccccaggccuauagccuuugugaaggaaagcaaaucauaccuccuguauauugacacgaaucugguuuucaaaugucauuuccagauuuuuuaguuaauuggggguuguccuuuucccuuaaugugagagucauuuuccuguauauuucuggaucucucaggggcugggaggggggagugaggggacuacaaccauagcacuccaagaacccuuuugggauuacuccaguaaucaacuacgaaaguuauuuucuaaauguagauauguaagguguucuuuuaaaguaagguacuuugaaauauguagcauaaacugguacugcuguuaaaugggucgauuauuaaacggagcagcugugugagggcagcuaacuuugaaugccugucucccuggcuggugugucuccuucucauguugagagcaccagggauugcguggcugcaugcugaaaccgcauuuucccaugguguaugacuaguucaucucuuucuugagcaccauuacaagaagaucaaaugaaaaugagaucaauguggaagacaauucauagcacaaaaaaagucaucuuaaaucuacucucaaacauucaucuuauacaugcaucaaaguaauuuacugacaucaguuugggugagagagggagucacuuuacugaaaaggcagaggcuuaagguguauacauuuguacucacuuccuuauuuucuuaacuuguaagcagaaaacaagcccucucucuugugaaguaucuucaaaggauuggggugcaaaaauaccuugcugguaagccaucaauguuuuauuuaaaucccugcauucaaaguuagcugccuuuuugaaauaaacaaacaaaaaauacuacuguauguuugaaaaugugaauaguauuuuuauagcuuguuaaagacauggcuaguugcauuuguaaauaaguauaauguugcuuugauuuucuuuuguggacaucuuuauuuggaacauaauugucuuuaggguugauuuguauauaaguaauuggccugugauuguuucuuuuuugguuggaaguuaucauuuugacauuacuugugauucuguguucagcacuauugugauguguucaaccucugcacucgcuuacacaauaggauaugccaauugugugugguguaauguuauuuugauuuuuuuccauguuauugaugaaggaucaugcaccuaacacauacuaacuuuuuuaauguuaggcauauuuuuaguauacuuucucuuauucuuucuucuccuccaaccuuuuacccauccuccuuccuuucccucauuccuguuguuauuugagaaugagggagaaacaguauuuuacauuuauguaauuaggcuuuuccguuaguucucaaggauccucuuuuggcucuugggaaagaauuguaccuguacaaggcaauuauagaaugcgaacugcuuugccucauuccauacugaucaucccagcugaacaauuugaaaacuguucugccuuuuuguuacaugaaucugucagaaauauauuuuuaauuuaauauaaaugaaauucaauaaaauaugaaacaaacguuaaaaaaaaaaaaaaaaaa

SEQ ID NO: 1167 - RNA, 19 nt, Artificial Sequence
  Description of Artificial Sequence: Synthetic oligonucleotide
augucuacaugaucauggu

SEQ ID NO: 1168 - RNA, 19 nt, Artificial Sequence
  Description of Artificial Sequence: Synthetic oligonucleotide
gaugucuacaugaucaugg

SEQ ID NO: 1169 - RNA, 19 nt, Artificial Sequence
  Description of Artificial Sequence: Synthetic oligonucleotide
gucuacaugaucaugguca

SEQ ID NO: 1170 - RNA, 19 nt, Artificial Sequence
  Description of Artificial Sequence: Synthetic oligonucleotide
ucuacaugaucauggucaa

SEQ ID NO: 1171 - RNA, 19 nt, Artificial Sequence
  Description of Artificial Sequence: Synthetic oligonucleotide
ugucuacaugaucaugguc

SEQ ID NO: 1172 - RNA, 19 nt, Artificial Sequence
  Description of Artificial Sequence: Synthetic oligonucleotide
accagagugaugucuggag

SEQ ID NO: 1173 - RNA, 19 nt, Artificial Sequence
  Description of Artificial Sequence: Synthetic oligonucleotide
agagugaugucuggagcua

SEQ ID NO: 1174 - RNA, 19 nt, Artificial Sequence
  Description of Artificial Sequence: Synthetic oligonucleotide
caccagagugaugucugga

SEQ ID NO: 1175 - RNA, 19 nt, Artificial Sequence
  Description of Artificial Sequence: Synthetic oligonucleotide
cagagugaugucuggagcu

SEQ ID NO: 1176 - RNA, 19 nt, Artificial Sequence
  Description of Artificial Sequence: Synthetic oligonucleotide
ccagagugaugucuggagc

SEQ ID NO: 1177 - RNA, 19 nt, Artificial Sequence
  Description of Artificial Sequence: Synthetic oligonucleotide
guuugggaguugaugaccu

SEQ ID NO: 1178 - RNA, 19 nt, Artificial Sequence
  Description of Artificial Sequence: Synthetic oligonucleotide
uuugggaguugaugaccuu

SEQ ID NO: 1179 - RNA, 19 nt, Artificial Sequence
  Description of Artificial Sequence: Synthetic oligonucleotide
auggucaaauguuggauga

SEQ ID NO: 1180 - RNA, 19 nt, Artificial Sequence
  Description of Artificial Sequence: Synthetic oligonucleotide
cauggucaaauguuggaug

SEQ ID NO: 1181 - RNA, 19 nt, Artificial Sequence
  Description of Artificial Sequence: Synthetic oligonucleotide
ggucaaauguuggaugauu

SEQ ID NO: 1182 - RNA, 19 nt, Artificial Sequence
  Description of Artificial Sequence: Synthetic oligonucleotide
gucaaauguuggaugauug

SEQ ID NO: 1183 - RNA, 19 nt, Artificial Sequence
  Description of Artificial Sequence: Synthetic oligonucleotide
ucaaauguuggaugauuga

SEQ ID NO: 1184 - RNA, 19 nt, Artificial Sequence
  Description of Artificial Sequence: Synthetic oligonucleotide
ucauggucaaauguuggau

SEQ ID NO: 1185 - RNA, 19 nt, Artificial Sequence
  Description of Artificial Sequence: Synthetic oligonucleotide
uggucaaauguuggaugau

SEQ ID NO: 1186 - RNA, 19 nt, Artificial Sequence
  Description of Artificial Sequence: Synthetic oligonucleotide
acacagacugcuuugccug

SEQ ID NO: 1187 - RNA, 19 nt, Artificial Sequence
  Description of Artificial Sequence: Synthetic oligonucleotide
cacagacugcuuugccugc

SEQ ID NO: 1188 - RNA, 19 nt, Artificial Sequence
  Description of Artificial Sequence: Synthetic oligonucleotide
ggacacagacugcuuugcc

SEQ ID NO: 1189 - RNA, 19 nt, Artificial Sequence
  Description of Artificial Sequence: Synthetic oligonucleotide
aggacacagacugcuuugc

SEQ ID NO: 1190 - RNA, 19 nt, Artificial Sequence
  Description of Artificial Sequence: Synthetic oligonucleotide
gacacagacugcuuugccu

SEQ ID NO: 1191 - RNA, 19 nt, Artificial Sequence
  Description of Artificial Sequence: Synthetic oligonucleotide
accaucgaugucuacauga

SEQ ID NO: 1192 - RNA, 19 nt, Artificial Sequence
  Description of Artificial Sequence: Synthetic oligonucleotide
aucgaugucuacaugauca

SEQ ID NO: 1193 - RNA, 19 nt, Artificial Sequence
  Description of Artificial Sequence: Synthetic oligonucleotide
caucgaugucuacaugauc

SEQ ID NO: 1194 - RNA, 19 nt, Artificial Sequence
  Description of Artificial Sequence: Synthetic oligonucleotide
ccaucgaugucuacaugau

SEQ ID NO: 1195 - RNA, 19 nt, Artificial Sequence
  Description of Artificial Sequence: Synthetic oligonucleotide
cgaugucuacaugaucaug

SEQ ID NO: 1196 - RNA, 19 nt, Artificial Sequence
  Description of Artificial Sequence: Synthetic oligonucleotide
ucgaugucuacaugaucau

SEQ ID NO: 1197 - RNA, 19 nt, Artificial Sequence
  Description of Artificial Sequence: Synthetic oligonucleotide
agugaugucuggagcuacg

SEQ ID NO: 1198 - RNA, 19 nt, Artificial Sequence
  Description of Artificial Sequence: Synthetic oligonucleotide
auggucaagugcuggauga

SEQ ID NO: 1199 - RNA, 19 nt, Artificial Sequence
  Description of Artificial Sequence: Synthetic oligonucleotide
gagugaugucuggagcuac

SEQ ID NO: 1200 - RNA, 19 nt, Artificial Sequence
  Description of Artificial Sequence: Synthetic oligonucleotide
gugaugucuggagcuacgg

SEQ ID NO: 1201 - RNA, 19 nt, Artificial Sequence
  Description of Artificial Sequence: Synthetic oligonucleotide
uggucaagugcuggaugau

SEQ ID NO: 1202 - RNA, 19 nt, Artificial Sequence
  Description of Artificial Sequence: Synthetic oligonucleotide
acaugaucauggucaaaug

SEQ ID NO: 1203 - RNA, 19 nt, Artificial Sequence
  Description of Artificial Sequence: Synthetic oligonucleotide
cuacaugaucauggucaaa

SEQ ID NO: 1204 - RNA, 19 nt, Artificial Sequence
  Description of Artificial Sequence: Synthetic oligonucleotide
gugcccaucaaguggaugg

SEQ ID NO: 1205 - RNA, 19 nt, Artificial Sequence
  Description of Artificial Sequence: Synthetic oligonucleotide
uacaugaucauggucaaau

SEQ ID NO: 1206 - RNA, 19 nt, Artificial Sequence
  Description of Artificial Sequence: Synthetic oligonucleotide
ugcccaucaaguggauggc

SEQ ID NO: 1207 - RNA, 19 nt, Artificial Sequence
  Description of Artificial Sequence: Synthetic oligonucleotide
ugcggagacugcugcagga

SEQ ID NO: 1208 - RNA, 19 nt, Artificial Sequence
  Description of Artificial Sequence: Synthetic oligonucleotide
aucauggucaaauguugga

SEQ ID NO: 1209 - RNA, 19 nt, Artificial Sequence
  Description of Artificial Sequence: Synthetic oligonucleotide
augaucauggucaaauguu

SEQ ID NO: 1210 - RNA, 19 nt, Artificial Sequence
  Description of Artificial Sequence: Synthetic oligonucleotide
caaauguuggaugauugac

SEQ ID NO: 1211 - RNA, 19 nt, Artificial Sequence
  Description of Artificial Sequence: Synthetic oligonucleotide
caugaucauggucaaaugu

SEQ ID NO: 1212 - RNA, 19 nt, Artificial Sequence
  Description of Artificial Sequence: Synthetic oligonucleotide
gaucauggucaaauguugg

SEQ ID NO: 1213 - RNA, 19 nt, Artificial Sequence
  Description of Artificial Sequence: Synthetic oligonucleotide
ugaucauggucaaauguug

SEQ ID NO: 1214 - RNA, 19 nt, Artificial Sequence
  Description of Artificial Sequence: Synthetic oligonucleotide
gggaguugaugaccuucgg

SEQ ID NO: 1215 - RNA, 19 nt, Artificial Sequence
  Description of Artificial Sequence: Synthetic oligonucleotide
ugggaguugaugaccuucg

SEQ ID NO: 1216 - RNA, 19 nt, Artificial Sequence
  Description of Artificial Sequence: Synthetic oligonucleotide
uugggaguugaugaccuuc

SEQ ID NO: 1217 - RNA, 19 nt, Artificial Sequence
  Description of Artificial Sequence: Synthetic oligonucleotide
acuucaaugacaguggagc

SEQ ID NO: 1218 - RNA, 19 nt, Artificial Sequence
  Description of Artificial Sequence: Synthetic oligonucleotide
gaccucuccuuccugcagu

SEQ ID NO: 1219 - RNA, 19 nt, Artificial Sequence
  Description of Artificial Sequence: Synthetic oligonucleotide
aaaaucacagauuuugggc

SEQ ID NO: 1220 - RNA, 19 nt, Artificial Sequence
  Description of Artificial Sequence: Synthetic oligonucleotide
aaaucacagauuuugggcu

SEQ ID NO: 1221 - RNA, 19 nt, Artificial Sequence
  Description of Artificial Sequence: Synthetic oligonucleotide
acagauuuugggcuagcca

SEQ ID NO: 1222 - RNA, 19 nt, Artificial Sequence
  Description of Artificial Sequence: Synthetic oligonucleotide
aucacagauuuugggcuag

SEQ ID NO: 1223 - RNA, 19 nt, Artificial Sequence
  Description of Artificial Sequence: Synthetic oligonucleotide
augccauccaaacugcacc

SEQ ID NO: 1224 - RNA, 19 nt, Artificial Sequence
  Description of Artificial Sequence: Synthetic oligonucleotide
cacagauuuugggcuagcc

SEQ ID NO: 1225 - RNA, 19 nt, Artificial Sequence
  Description of Artificial Sequence: Synthetic oligonucleotide
gccauccaaacugcaccca

SEQ ID NO: 1226 - RNA, 19 nt, Artificial Sequence
  Description of Artificial Sequence: Synthetic oligonucleotide
ucacagauuuugggcuagc

SEQ ID NO: 1227 - RNA, 19 nt, Artificial Sequence
  Description of Artificial Sequence: Synthetic oligonucleotide
ugccauccaaacugcaccc

SEQ ID NO: 1228 - RNA, 19 nt, Artificial Sequence
  Description of Artificial Sequence: Synthetic oligonucleotide
cuuaugccccauggcugcc

SEQ ID NO: 1229 - RNA, 19 nt, Artificial Sequence
  Description of Artificial Sequence: Synthetic oligonucleotide
ugauggaugcugaggagua

SEQ ID NO: 1230 - RNA, 19 nt, Artificial Sequence
  Description of Artificial Sequence: Synthetic oligonucleotide
uuaugccccauggcugccu

SEQ ID NO: 1231 - RNA, 19 nt, Artificial Sequence
  Description of Artificial Sequence: Synthetic oligonucleotide
aaauguuggaugauugaug

SEQ ID NO: 1232 - RNA, 19 nt, Artificial Sequence
  Description of Artificial Sequence: Synthetic oligonucleotide
aacugcacccaagggugua

SEQ ID NO: 1233 - RNA, 19 nt, Artificial Sequence
  Description of Artificial Sequence: Synthetic oligonucleotide
acugcacccaaggguguaa

SEQ ID NO: 1234 - RNA, 19 nt, Artificial Sequence
  Description of Artificial Sequence: Synthetic oligonucleotide
caaauguuggaugauugau

SEQ ID NO: 1235 - RNA, 19 nt, Artificial Sequence
  Description of Artificial Sequence: Synthetic oligonucleotide
acaugaucauggucaagug

SEQ ID NO: 1236 - RNA, 19 nt, Artificial Sequence
  Description of Artificial Sequence: Synthetic oligonucleotide
acccaccagagugaugucu

SEQ ID NO: 1237 - RNA, 19 nt, Artificial Sequence
  Description of Artificial Sequence: Synthetic oligonucleotide
agugugcugcaggcugcac

SEQ ID NO: 1238 - RNA, 19 nt, Artificial Sequence
  Description of Artificial Sequence: Synthetic oligonucleotide
cagugugcugcaggcugca

SEQ ID NO: 1239 - RNA, 19 nt, Artificial Sequence
  Description of Artificial Sequence: Synthetic oligonucleotide
ccaccagagugaugucugg

SEQ ID NO: 1240 - RNA, 19 nt, Artificial Sequence
  Description of Artificial Sequence: Synthetic oligonucleotide
cccaccagagugaugucug

SEQ ID NO: 1241 - RNA, 19 nt, Artificial Sequence
  Description of Artificial Sequence: Synthetic oligonucleotide
ccgccugcugggcaucugc

SEQ ID NO: 1242 - RNA, 19 nt, Artificial Sequence
  Description of Artificial Sequence: Synthetic oligonucleotide
cgccugcugggcaucugcc

SEQ ID NO: 1243 - RNA, 19 nt, Artificial Sequence
  Description of Artificial Sequence: Synthetic oligonucleotide
cuacaugaucauggucaag

SEQ ID NO: 1244 - RNA, 19 nt, Artificial Sequence
  Description of Artificial Sequence: Synthetic oligonucleotide
gccugcugggcaucugccu

SEQ ID NO: 1245 - RNA, 19 nt, Artificial Sequence
  Description of Artificial Sequence: Synthetic oligonucleotide
gugccuaucaaguggaugg

SEQ ID NO: 1246 - RNA, 19 nt, Artificial Sequence
  Description of Artificial Sequence: Synthetic oligonucleotide
uacaugaucauggucaagu

SEQ ID NO: 1247 - RNA, 19 nt, Artificial Sequence
  Description of Artificial Sequence: Synthetic oligonucleotide
ugccuaucaaguggauggc

SEQ ID NO: 1248 - RNA, 19 nt, Artificial Sequence
  Description of Artificial Sequence: Synthetic oligonucleotide
ugcggaggcugcugcagga

SEQ ID NO: 1249 - RNA, 19 nt, Artificial Sequence
  Description of Artificial Sequence: Synthetic oligonucleotide
accguuugggaguugauga

SEQ ID NO: 1250 - RNA, 19 nt, Artificial Sequence
  Description of Artificial Sequence: Synthetic oligonucleotide
ccguuugggaguugaugac

SEQ ID NO: 1251 - RNA, 19 nt, Artificial Sequence
  Description of Artificial Sequence: Synthetic oligonucleotide
cguuugggaguugaugacc

SEQ ID NO: 1252 - RNA, 19 nt, Artificial Sequence
  Description of Artificial Sequence: Synthetic oligonucleotide
gaccguuugggaguugaug

SEQ ID NO: 1253 - RNA, 19 nt, Artificial Sequence
  Description of Artificial Sequence: Synthetic oligonucleotide
gggaguugaugaccuuugg

SEQ ID NO: 1254 - RNA, 19 nt, Artificial Sequence
  Description of Artificial Sequence: Synthetic oligonucleotide
gugaccguuugggaguuga

SEQ ID NO: 1255 - RNA, 19 nt, Artificial Sequence
  Description of Artificial Sequence: Synthetic oligonucleotide
ugaccguuugggaguugau

SEQ ID NO: 1256 - RNA, 19 nt, Artificial Sequence
  Description of Artificial Sequence: Synthetic oligonucleotide
ugggaguugaugaccuuug

SEQ ID NO: 1257 - RNA, 19 nt, Artificial Sequence
  Description of Artificial Sequence: Synthetic oligonucleotide
uugggaguugaugaccuuu

SEQ ID NO: 1258 - RNA, 19 nt, Artificial Sequence
  Description of Artificial Sequence: Synthetic oligonucleotide
aagaucacagauuuugggc

SEQ ID NO: 1259 - RNA, 19 nt, Artificial Sequence
  Description of Artificial Sequence: Synthetic oligonucleotide
acagauuuugggcuggcca

SEQ ID NO: 1260 - RNA, 19 nt, Artificial Sequence
  Description of Artificial Sequence: Synthetic oligonucleotide
agaucacagauuuugggcu

SEQ ID NO: 1261 - RNA, 19 nt, Artificial Sequence
  Description of Artificial Sequence: Synthetic oligonucleotide
aucacagauuuugggcugg

SEQ ID NO: 1262 - RNA, 19 nt, Artificial Sequence
  Description of Artificial Sequence: Synthetic oligonucleotide
cacagauuuugggcuggcc

SEQ ID NO: 1263 - RNA, 19 nt, Artificial Sequence
  Description of Artificial Sequence: Synthetic oligonucleotide
gccauccaaacugcaccua

SEQ ID NO: 1264 - RNA, 19 nt, Artificial Sequence
  Description of Artificial Sequence: Synthetic oligonucleotide
gugccauccaaacugcacc

SEQ ID NO: 1265 - RNA, 19 nt, Artificial Sequence
  Description of Artificial Sequence: Synthetic oligonucleotide
ucacagauuuugggcuggc

SEQ ID NO: 1266 - RNA, 19 nt, Artificial Sequence
  Description of Artificial Sequence: Synthetic oligonucleotide
ugccauccaaacugcaccu

SEQ ID NO: 1267 - RNA, 19 nt, Artificial Sequence
  Description of Artificial Sequence: Synthetic oligonucleotide
accagagugauguguggag

SEQ ID NO: 1268 - RNA, 19 nt, Artificial Sequence
  Description of Artificial Sequence: Synthetic oligonucleotide
accauugaugucuacauga

SEQ ID NO: 1269 - RNA, 19 nt, Artificial Sequence
  Description of Artificial Sequence: Synthetic oligonucleotide
acccaccagagugaugugu

SEQ ID NO: 1270 - RNA, 19 nt, Artificial Sequence
  Description of Artificial Sequence: Synthetic oligonucleotide
agugugcugccggcugcac

SEQ ID NO: 1271 - RNA, 19 nt, Artificial Sequence
  Description of Artificial Sequence: Synthetic oligonucleotide
auugaugucuacaugauca

SEQ ID NO: 1272 - RNA, 19 nt, Artificial Sequence
  Description of Artificial Sequence: Synthetic oligonucleotide
caccagagugaugugugga

SEQ ID NO: 1273 - RNA, 19 nt, Artificial Sequence
  Description of Artificial Sequence: Synthetic oligonucleotide
cagugugcugccggcugca

SEQ ID NO: 1274 - RNA, 19 nt, Artificial Sequence
  Description of Artificial Sequence: Synthetic oligonucleotide
cauugaugucuacaugauc

SEQ ID NO: 1275 - RNA, 19 nt, Artificial Sequence
  Description of Artificial Sequence: Synthetic oligonucleotide
ccaccagagugaugugugg

SEQ ID NO: 1276 - RNA, 19 nt, Artificial Sequence
  Description of Artificial Sequence: Synthetic oligonucleotide
ccauugaugucuacaugau

SEQ ID NO: 1277 - RNA, 19 nt, Artificial Sequence
  Description of Artificial Sequence: Synthetic oligonucleotide
cccaccagagugaugugug

SEQ ID NO: 1278 - RNA, 19 nt, Artificial Sequence
  Description of Artificial Sequence: Synthetic oligonucleotide
ccgccuucugggcaucugc

SEQ ID NO: 1279 - RNA, 19 nt, Artificial Sequence
  Description of Artificial Sequence: Synthetic oligonucleotide
cgccuucugggcaucugcc

SEQ ID NO: 1280 - RNA, 19 nt, Artificial Sequence
  Description of Artificial Sequence: Synthetic oligonucleotide
gccuucugggcaucugccu

SEQ ID NO: 1281 - RNA, 19 nt, Artificial Sequence
  Description of Artificial Sequence: Synthetic oligonucleotide
ugaugucuacaugaucaug

SEQ ID NO: 1282 - RNA, 19 nt, Artificial Sequence
  Description of Artificial Sequence: Synthetic oligonucleotide
uugaugucuacaugaucau

SEQ ID NO: 1283 - RNA, 19 nt, Artificial Sequence
  Description of Artificial Sequence: Synthetic oligonucleotide
aucugcaccauugaugucu

SEQ ID NO: 1284 - RNA, 19 nt, Artificial Sequence
  Description of Artificial Sequence: Synthetic oligonucleotide
caccauugaugucuacaug

SEQ ID NO: 1285 - RNA, 19 nt, Artificial Sequence
  Description of Artificial Sequence: Synthetic oligonucleotide
cugcaccauugaugucuac

SEQ ID NO: 1286 - RNA, 19 nt, Artificial Sequence
  Description of Artificial Sequence: Synthetic oligonucleotide
gcaccauugaugucuacau

SEQ ID NO: 1287 - RNA, 19 nt, Artificial Sequence
  Description of Artificial Sequence: Synthetic oligonucleotide
ucugcaccauugaugucua

SEQ ID NO: 1288 - RNA, 19 nt, Artificial Sequence
  Description of Artificial Sequence: Synthetic oligonucleotide
ugcaccauugaugucuaca

SEQ ID NO: 1289 - RNA, 19 nt, Artificial Sequence
  Description of Artificial Sequence: Synthetic oligonucleotide
cuuaugcccuauggcugcc

SEQ ID NO: 1290 - RNA, 19 nt, Artificial Sequence
  Description of Artificial Sequence: Synthetic oligonucleotide
ugguggaugcugaggagua

SEQ ID NO: 1291 - RNA, 19 nt, Artificial Sequence
  Description of Artificial Sequence: Synthetic oligonucleotide
uuaugcccuauggcugccu

SEQ ID NO: 1292 - RNA, 19 nt, Artificial Sequence
  Description of Artificial Sequence: Synthetic oligonucleotide
acacaccagagugaugucu

SEQ ID NO: 1293 - RNA, 19 nt, Artificial Sequence
  Description of Artificial Sequence: Synthetic oligonucleotide
acaccagagugaugucugg

SEQ ID NO: 1294 - RNA, 19 nt, Artificial Sequence
  Description of Artificial Sequence: Synthetic oligonucleotide
acaguuugggaguugauga

SEQ ID NO: 1295 - RNA, 19 nt, Artificial Sequence
  Description of Artificial Sequence: Synthetic oligonucleotide
agugaugucuggagcuaug

SEQ ID NO: 1296 - RNA, 19 nt, Artificial Sequence
  Description of Artificial Sequence: Synthetic oligonucleotide
aguuugggaguugaugacc

SEQ ID NO: 1297 - RNA, 19 nt, Artificial Sequence
  Description of Artificial Sequence: Synthetic oligonucleotide
auggucaaguguuggauga

SEQ ID NO: 1298 - RNA, 19 nt, Artificial Sequence
  Description of Artificial Sequence: Synthetic oligonucleotide
cacaccagagugaugucug

SEQ ID NO: 1299 - RNA, 19 nt, Artificial Sequence
  Description of Artificial Sequence: Synthetic oligonucleotide
caguuugggaguugaugac

SEQ ID NO: 1300 - RNA, 19 nt, Artificial Sequence
  Description of Artificial Sequence: Synthetic oligonucleotide
gacaguuugggaguugaug

SEQ ID NO: 1301 - RNA, 19 nt, Artificial Sequence
  Description of Artificial Sequence: Synthetic oligonucleotide
gagugaugucuggagcuau

SEQ ID NO: 1302 - RNA, 19 nt, Artificial Sequence
  Description of Artificial Sequence: Synthetic oligonucleotide
gugacaguuugggaguuga

SEQ ID NO: 1303 - RNA, 19 nt, Artificial Sequence
  Description of Artificial Sequence: Synthetic oligonucleotide
gugaugucuggagcuaugg

SEQ ID NO: 1304 - RNA, 19 nt, Artificial Sequence
  Description of Artificial Sequence: Synthetic oligonucleotide
ugacaguuugggaguugau

SEQ ID NO: 1305 - RNA, 19 nt, Artificial Sequence
  Description of Artificial Sequence: Synthetic oligonucleotide
uggucaaguguuggaugau

SEQ ID NO: 1306 - RNA, 19 nt, Artificial Sequence
  Description of Artificial Sequence: Synthetic oligonucleotide
aucugcacaauugaugucu

SEQ ID NO: 1307 - RNA, 19 nt, Artificial Sequence
  Description of Artificial Sequence: Synthetic oligonucleotide
cacaauugaugucuacaug

SEQ ID NO: 1308 - RNA, 19 nt, Artificial Sequence
  Description of Artificial Sequence: Synthetic oligonucleotide
cugcacaauugaugucuac

SEQ ID NO: 1309 - RNA, 19 nt, Artificial Sequence
  Description of Artificial Sequence: Synthetic oligonucleotide
gcacaauugaugucuacau

SEQ ID NO: 1310 - RNA, 19 nt, Artificial Sequence
  Description of Artificial Sequence: Synthetic oligonucleotide
ggucaaguguuggaugauu

SEQ ID NO: 1311 - RNA, 19 nt, Artificial Sequence
  Description of Artificial Sequence: Synthetic oligonucleotide
gucaaguguuggaugauug

SEQ ID NO: 1312 - RNA, 19 nt, Artificial Sequence
  Description of Artificial Sequence: Synthetic oligonucleotide
ucaaguguuggaugauuga

SEQ ID NO: 1313 - RNA, 19 nt, Artificial Sequence
  Description of Artificial Sequence: Synthetic oligonucleotide
ucugcacaauugaugucua

SEQ ID NO: 1314 - RNA, 19 nt, Artificial Sequence
  Description of Artificial Sequence: Synthetic oligonucleotide
ugcacaauugaugucuaca

SEQ ID NO: 1315 - RNA, 19 nt, Artificial Sequence
  Description of Artificial Sequence: Synthetic oligonucleotide
aaguguuggaugauugaug

SEQ ID NO: 1316 - RNA, 19 nt, Artificial Sequence
  Description of Artificial Sequence: Synthetic oligonucleotide
acagacugcuuugccugcc

SEQ ID NO: 1317 - RNA, 19 nt, Artificial Sequence
  Description of Artificial Sequence: Synthetic oligonucleotide
augacaguggagccugugu

SEQ ID NO: 1318 - RNA, 19 nt, Artificial Sequence
  Description of Artificial Sequence: Synthetic oligonucleotide
caaguguuggaugauugau

SEQ ID NO: 1319 - RNA, 19 nt, Artificial Sequence
  Description of Artificial Sequence: Synthetic oligonucleotide
caaugacaguggagccugu

SEQ ID NO: 1320 - RNA, 19 nt, Artificial Sequence
  Description of Artificial Sequence: Synthetic oligonucleotide
ccucaggacacagacugcu

SEQ ID NO: 1321 - RNA, 19 nt, Artificial Sequence
  Description of Artificial Sequence: Synthetic oligonucleotide
cucaggacacagacugcuu

SEQ ID NO: 1322 - RNA, 19 nt, Artificial Sequence
  Description of Artificial Sequence: Synthetic oligonucleotide
uucgagaagugacaggcua

SEQ ID NO: 1323 - RNA, 19 nt, Artificial Sequence
  Description of Artificial Sequence: Synthetic oligonucleotide
acauggucauggucaaaug

SEQ ID NO: 1324 - RNA, 19 nt, Artificial Sequence
  Description of Artificial Sequence: Synthetic oligonucleotide
auggucauggucaaauguu

SEQ ID NO: 1325 - RNA, 19 nt, Artificial Sequence
  Description of Artificial Sequence: Synthetic oligonucleotide
cauggucauggucaaaugu

SEQ ID NO: 1326 - RNA, 19 nt, Artificial Sequence
  Description of Artificial Sequence: Synthetic oligonucleotide
ggucauggucaaauguugg

SEQ ID NO: 1327 - RNA, 19 nt, Artificial Sequence
  Description of Artificial Sequence: Synthetic oligonucleotide
gucauggucaaauguugga

SEQ ID NO: 1328 - RNA, 19 nt, Artificial Sequence
  Description of Artificial Sequence: Synthetic oligonucleotide
uacauggucauggucaaau

SEQ ID NO: 1329 - RNA, 19 nt, Artificial Sequence
  Description of Artificial Sequence: Synthetic oligonucleotide
uggucauggucaaauguug

SEQ ID NO: 1330 - RNA, 19 nt, Artificial Sequence
  Description of Artificial Sequence: Synthetic oligonucleotide
aaggacacagacugcuuug

SEQ ID NO: 1331 - RNA, 19 nt, Artificial Sequence
  Description of Artificial Sequence: Synthetic oligonucleotide
aaugacaguggagcaugug

SEQ ID NO: 1332 - RNA, 19 nt, Artificial Sequence
  Description of Artificial Sequence: Synthetic oligonucleotide
acagacugcuuugccugca

SEQ ID NO: 1333 - RNA, 19 nt, Artificial Sequence
  Description of Artificial Sequence: Synthetic oligonucleotide
acuucaguguuuuuucuaa

SEQ ID NO: 1334 - RNA, 19 nt, Artificial Sequence
  Description of Artificial Sequence: Synthetic oligonucleotide
augacaguggagcaugugu

SEQ ID NO: 1335 - RNA, 19 nt, Artificial Sequence
  Description of Artificial Sequence: Synthetic oligonucleotide
auuucaaugacaguggagc

SEQ ID NO: 1336 - RNA, 19 nt, Artificial Sequence
  Description of Artificial Sequence: Synthetic oligonucleotide
caaugacaguggagcaugu

SEQ ID NO: 1337 - RNA, 19 nt, Artificial Sequence
  Description of Artificial Sequence: Synthetic oligonucleotide
ccuaaggacacagacugcu

SEQ ID NO: 1338 - RNA, 19 nt, Artificial Sequence
  Description of Artificial Sequence: Synthetic oligonucleotide
cuaaggacacagacugcuu

SEQ ID NO: 1339 - RNA, 19 nt, Artificial Sequence
  Description of Artificial Sequence: Synthetic oligonucleotide
gaccucuccuuccugcggu

SEQ ID NO: 1340 - RNA, 19 nt, Artificial Sequence
  Description of Artificial Sequence: Synthetic oligonucleotide
guccacauaacuuuguggu

SEQ ID NO: 1341 - RNA, 19 nt, Artificial Sequence
  Description of Artificial Sequence: Synthetic oligonucleotide
uaaggacacagacugcuuu

SEQ ID NO: 1342 - RNA, 19 nt, Artificial Sequence
  Description of Artificial Sequence: Synthetic oligonucleotide
ucaaugacaguggagcaug

SEQ ID NO: 1343 - RNA, 19 nt, Artificial Sequence
  Description of Artificial Sequence: Synthetic oligonucleotide
uguccacauaacuuugugg

SEQ ID NO: 1344 - RNA, 19 nt, Artificial Sequence
  Description of Artificial Sequence: Synthetic oligonucleotide
uucaaugacaguggagcau

SEQ ID NO: 1345 - RNA, 19 nt, Artificial Sequence
  Description of Artificial Sequence: Synthetic oligonucleotide
uucgagaagucacaggcua

SEQ ID NO: 1346 - RNA, 19 nt, Artificial Sequence
  Description of Artificial Sequence: Synthetic oligonucleotide
ccaaaauggcccgagaccc

SEQ ID NO: 1347 - RNA, 19 nt, Artificial Sequence
  Description of Artificial Sequence: Synthetic oligonucleotide
cggagacugcugcaggaaa

SEQ ID NO: 1348 - RNA, 19 nt, Artificial Sequence
  Description of Artificial Sequence: Synthetic oligonucleotide
gcggagacugcugcaggaa

SEQ ID NO: 1349 - RNA, 19 nt, Artificial Sequence
  Description of Artificial Sequence: Synthetic oligonucleotide
aagagaucacagguuaccu

SEQ ID NO: 1350 - RNA, 19 nt, Artificial Sequence
  Description of Artificial Sequence: Synthetic oligonucleotide
agagaucacagguuaccua

SEQ ID NO: 1351 - RNA, 19 nt, Artificial Sequence
  Description of Artificial Sequence: Synthetic oligonucleotide
agccccccaucugcaccau

SEQ ID NO: 1352 - RNA, 19 nt, Artificial Sequence
  Description of Artificial Sequence: Synthetic oligonucleotide
cagccccccaucugcacca

SEQ ID NO: 1353 - RNA, 19 nt, Artificial Sequence
  Description of Artificial Sequence: Synthetic oligonucleotide
cccagccccccaucugcac

SEQ ID NO: 1354 - RNA, 19 nt, Artificial Sequence
  Description of Artificial Sequence: Synthetic oligonucleotide
ccccagccccccaucugca

SEQ ID NO: 1355 - RNA, 19 nt, Artificial Sequence
  Description of Artificial Sequence: Synthetic oligonucleotide
cccccaucugcaccauuga

SEQ ID NO: 1356 - RNA, 19 nt, Artificial Sequence
  Description of Artificial Sequence: Synthetic oligonucleotide
ccccccaucugcaccauug

SEQ ID NO: 1357 - RNA, 19 nt, Artificial Sequence
  Description of Artificial Sequence: Synthetic oligonucleotide
gccccagccccccaucugc

SEQ ID NO: 1358 - RNA, 19 nt, Artificial Sequence
  Description of Artificial Sequence: Synthetic oligonucleotide
gccccccaucugcaccauu

SEQ ID NO: 1359 - RNA, 19 nt, Artificial Sequence
  Description of Artificial Sequence: Synthetic oligonucleotide
ugccccagccccccaucug

SEQ ID NO: 1360 - RNA, 19 nt, Artificial Sequence
  Description of Artificial Sequence: Synthetic oligonucleotide
aaagagacagagcuaagga

SEQ ID NO: 1361 - RNA, 19 nt, Artificial Sequence
  Description of Artificial Sequence: Synthetic oligonucleotide
aagagacagagcuaaggaa

SEQ ID NO: 1362 - RNA, 19 nt, Artificial Sequence
  Description of Artificial Sequence: Synthetic oligonucleotide
agagacagagcuaaggaag

SEQ ID NO: 1363 - RNA, 19 nt, Artificial Sequence
  Description of Artificial Sequence: Synthetic oligonucleotide
aacuucaguguuuuuucca

SEQ ID NO: 1364 - RNA, 19 nt, Artificial Sequence
  Description of Artificial Sequence: Synthetic oligonucleotide
aaucacagauuuugggcua

SEQ ID NO: 1365 - RNA, 19 nt, Artificial Sequence
  Description of Artificial Sequence: Synthetic oligonucleotide
acccaugccauccaaacug

SEQ ID NO: 1366 - RNA, 19 nt, Artificial Sequence
  Description of Artificial Sequence: Synthetic oligonucleotide
cacccaugccauccaaacu

SEQ ID NO: 1367 - RNA, 19 nt, Artificial Sequence
  Description of Artificial Sequence: Synthetic oligonucleotide
caugccauccaaacugcac

SEQ ID NO: 1368 - RNA, 19 nt, Artificial Sequence
  Description of Artificial Sequence: Synthetic oligonucleotide
ccacccaugccauccaaac

SEQ ID NO: 1369 - RNA, 19 nt, Artificial Sequence
  Description of Artificial Sequence: Synthetic oligonucleotide
ccaugccauccaaacugca

SEQ ID NO: 1370 - RNA, 19 nt, Artificial Sequence
  Description of Artificial Sequence: Synthetic oligonucleotide
cccaugccauccaaacugc

SEQ ID NO: 1371 - RNA, 19 nt, Artificial Sequence
  Description of Artificial Sequence: Synthetic oligonucleotide
gccacccaugccauccaaa

SEQ ID NO: 1372 - RNA, 19 nt, Artificial Sequence
  Description of Artificial Sequence: Synthetic oligonucleotide
ggaacugaugaccuuugga

SEQ ID NO: 1373 - RNA, 19 nt, Artificial Sequence
  Description of Artificial Sequence: Synthetic oligonucleotide
gggaacugaugaccuuugg

SEQ ID NO: 1374 - RNA, 19 nt, Artificial Sequence
  Description of Artificial Sequence: Synthetic oligonucleotide
gugccacccaugccaucca

SEQ ID NO: 1375 - RNA, 19 nt, Artificial Sequence
  Description of Artificial Sequence: Synthetic oligonucleotide
ugccacccaugccauccaa

SEQ ID NO: 1376 - RNA, 19 nt, Artificial Sequence
  Description of Artificial Sequence: Synthetic oligonucleotide
ugggaacugaugaccuuug

SEQ ID NO: 1377 - RNA, 19 nt, Artificial Sequence
  Description of Artificial Sequence: Synthetic oligonucleotide
aacuuaugccccauggcug

SEQ ID NO: 1378 - RNA, 19 nt, Artificial Sequence
  Description of Artificial Sequence: Synthetic oligonucleotide
acuuaugccccauggcugc

SEQ ID NO: 1379 - RNA, 19 nt, Artificial Sequence
  Description of Artificial Sequence: Synthetic oligonucleotide
caacuuaugccccauggcu

SEQ ID NO: 1380 - RNA, 19 nt, Artificial Sequence
  Description of Artificial Sequence: Synthetic oligonucleotide
gauggaugcugaggaguac

SEQ ID NO: 1381 - RNA, 19 nt, Artificial Sequence
  Description of Artificial Sequence: Synthetic oligonucleotide
aaacugcacccaagggugu

SEQ ID NO: 1382 - RNA, 19 nt, Artificial Sequence
  Description of Artificial Sequence: Synthetic oligonucleotide
cccugaaggaaaucagcgc

SEQ ID NO: 1383 - RNA, 19 nt, Artificial Sequence
  Description of Artificial Sequence: Synthetic oligonucleotide
ucccugaaggaaaucagcg

SEQ ID NO: 1384 - RNA, 19 nt, Artificial Sequence
  Description of Artificial Sequence: Synthetic oligonucleotide
ugacaacccugacuacugg

SEQ ID NO: 1385 - RNA, 19 nt, Artificial Sequence
  Description of Artificial Sequence: Synthetic oligonucleotide
uugacaacccugacuacug

SEQ ID NO: 1386 - RNA, 19 nt, Artificial Sequence
  Description of Artificial Sequence: Synthetic oligonucleotide
uuugacaacccugacuacu

SEQ ID NO: 1387 - RNA, 19 nt, Artificial Sequence
  Description of Artificial Sequence: Synthetic oligonucleotide
aaagccaacaaggaaaucc

SEQ ID NO: 1388 - RNA, 19 nt, Artificial Sequence
  Description of Artificial Sequence: Synthetic oligonucleotide
aaagugccuaucaagugga

SEQ ID NO: 1389 - RNA, 19 nt, Artificial Sequence
  Description of Artificial Sequence: Synthetic oligonucleotide
aacuggugugugcagaucg

SEQ ID NO: 1390 - RNA, 19 nt, Artificial Sequence
  Description of Artificial Sequence: Synthetic oligonucleotide
aagccaacaaggaaauccu

SEQ ID NO: 1391 - RNA, 19 nt, Artificial Sequence
  Description of Artificial Sequence: Synthetic oligonucleotide
aagugccuaucaaguggau

SEQ ID NO: 1392 - RNA, 19 nt, Artificial Sequence
  Description of Artificial Sequence: Synthetic oligonucleotide
accaugcagaaggaggcaa

SEQ ID NO: 1393 - RNA, 19 nt, Artificial Sequence
  Description of Artificial Sequence: Synthetic oligonucleotide
acuggugugugcagaucgc

SEQ ID NO: 1394 - RNA, 19 nt, Artificial Sequence
  Description of Artificial Sequence: Synthetic oligonucleotide
agaaagaauaccaugcaga

SEQ ID NO: 1395 - RNA, 19 nt, Artificial Sequence
  Description of Artificial Sequence: Synthetic oligonucleotide
agugccuaucaaguggaug

SEQ ID NO: 1396 - RNA, 19 nt, Artificial Sequence
  Description of Artificial Sequence: Synthetic oligonucleotide
aucaaguggauggcauugg

SEQ ID NO: 1397 - RNA, 19 nt, Artificial Sequence
  Description of Artificial Sequence: Synthetic oligonucleotide
aucauggucaagugcugga

SEQ ID NO: 1398 - RNA, 19 nt, Artificial Sequence
  Description of Artificial Sequence: Synthetic oligonucleotide
augaucauggucaagugcu

SEQ ID NO: 1399 - RNA, 19 nt, Artificial Sequence
  Description of Artificial Sequence: Synthetic oligonucleotide
auggcccgagacccccagc

SEQ ID NO: 1400 - RNA, 19 nt, Artificial Sequence
  Description of Artificial Sequence: Synthetic oligonucleotide
caaagugccuaucaagugg

SEQ ID NO: 1401 - RNA, 19 nt, Artificial Sequence
  Description of Artificial Sequence: Synthetic oligonucleotide
caugaucauggucaagugc

SEQ ID NO: 1402 - RNA, 19 nt, Artificial Sequence
  Description of Artificial Sequence: Synthetic oligonucleotide
cauggucaagugcuggaug

SEQ ID NO: 1403 - RNA, 19 nt, Artificial Sequence
  Description of Artificial Sequence: Synthetic oligonucleotide
cugcaggcugcacaggccc

SEQ ID NO: 1404 - RNA, 19 nt, Artificial Sequence
  Description of Artificial Sequence: Synthetic oligonucleotide
gagaaagaauaccaugcag

SEQ ID NO: 1405 - RNA, 19 nt, Artificial Sequence
  Description of Artificial Sequence: Synthetic oligonucleotide
gaucauggucaagugcugg

SEQ ID NO: 1406 - RNA, 19 nt, Artificial Sequence
  Description of Artificial Sequence: Synthetic oligonucleotide
gcaaagugccuaucaagug

SEQ ID NO: 1407 - RNA, 19 nt, Artificial Sequence
  Description of Artificial Sequence: Synthetic oligonucleotide
gcccgagacccccagcgcu

SEQ ID NO: 1408 - RNA, 19 nt, Artificial Sequence
  Description of Artificial Sequence: Synthetic oligonucleotide
gccuaucaaguggauggca

SEQ ID NO: 1409 - RNA, 19 nt, Artificial Sequence
  Description of Artificial Sequence: Synthetic oligonucleotide
gcugcaggcugcacaggcc

SEQ ID NO: 1410 - RNA, 19 nt, Artificial Sequence
  Description of Artificial Sequence: Synthetic oligonucleotide
ggcaaagugccuaucaagu

SEQ ID NO: 1411 - RNA, 19 nt, Artificial Sequence
  Description of Artificial Sequence: Synthetic oligonucleotide
ggcccgagacccccagcgc

SEQ ID NO: 1412 - RNA, 19 nt, Artificial Sequence
  Description of Artificial Sequence: Synthetic oligonucleotide
guaccaucgaugucuacau

SEQ ID NO: 1413 - RNA, 19 nt, Artificial Sequence
  Description of Artificial Sequence: Synthetic oligonucleotide
gugcugcaggcugcacagg

SEQ ID NO: 1414 - RNA, 19 nt, Artificial Sequence
  Description of Artificial Sequence: Synthetic oligonucleotide
gugugcugcaggcugcaca

SEQ ID NO: 1415 - RNA, 19 nt, Artificial Sequence
  Description of Artificial Sequence: Synthetic oligonucleotide
uaccaucgaugucuacaug

SEQ ID NO: 1416 - RNA, 19 nt, Artificial Sequence
  Description of Artificial Sequence: Synthetic oligonucleotide
uaccaugcagaaggaggca

SEQ ID NO: 1417 - RNA, 19 nt, Artificial Sequence
  Description of Artificial Sequence: Synthetic oligonucleotide
ucaaguggauggcauugga

SEQ ID NO: 1418 - RNA, 19 nt, Artificial Sequence
  Description of Artificial Sequence: Synthetic oligonucleotide
ucauggucaagugcuggau

SEQ ID NO: 1419 - RNA, 19 nt, Artificial Sequence
  Description of Artificial Sequence: Synthetic oligonucleotide
ugaucauggucaagugcug

SEQ ID NO: 1420 - RNA, 19 nt, Artificial Sequence
  Description of Artificial Sequence: Synthetic oligonucleotide
ugcaggcugcacaggcccc

SEQ ID NO: 1421 - RNA, 19 nt, Artificial Sequence
  Description of Artificial Sequence: Synthetic oligonucleotide
ugcugcaggcugcacaggc

SEQ ID NO: 1422 - RNA, 19 nt, Artificial Sequence
  Description of Artificial Sequence: Synthetic oligonucleotide
uggcccgagacccccagcg

SEQ ID NO: 1423 - RNA, 19 nt, Artificial Sequence
  Description of Artificial Sequence: Synthetic oligonucleotide
ugguggaugccgacgagua

SEQ ID NO: 1424 - RNA, 19 nt, Artificial Sequence
  Description of Artificial Sequence: Synthetic oligonucleotide
uguaccaucgaugucuaca

SEQ ID NO: 1425 - RNA, 19 nt, Artificial Sequence
  Description of Artificial Sequence: Synthetic oligonucleotide
ugugcugcaggcugcacag

SEQ ID NO: 1426 - RNA, 19 nt, Artificial Sequence
  Description of Artificial Sequence: Synthetic oligonucleotide
acugccagaaacugaccaa

SEQ ID NO: 1427 - RNA, 19 nt, Artificial Sequence
  Description of Artificial Sequence: Synthetic oligonucleotide
augucuggagcuacggggu

SEQ ID NO: 1428 - RNA, 19 nt, Artificial Sequence
  Description of Artificial Sequence: Synthetic oligonucleotide
gaugucuggagcuacgggg

SEQ ID NO: 1429 - RNA, 19 nt, Artificial Sequence
  Description of Artificial Sequence: Synthetic oligonucleotide
ggaguugaugaccuuugga

SEQ ID NO: 1430 - RNA, 19 nt, Artificial Sequence
  Description of Artificial Sequence: Synthetic oligonucleotide
ggucaagugcuggaugaua

SEQ ID NO: 1431 - RNA, 19 nt, Artificial Sequence
  Description of Artificial Sequence: Synthetic oligonucleotide
gucaagugcuggaugauag

SEQ ID NO: 1432 - RNA, 19 nt, Artificial Sequence
  Description of Artificial Sequence: Synthetic oligonucleotide
gucuggagcuacgggguga

SEQ ID NO: 1433 - RNA, 19 nt, Artificial Sequence
  Description of Artificial Sequence: Synthetic oligonucleotide
ucaagugcuggaugauaga

SEQ ID NO: 1434 - RNA, 19 nt, Artificial Sequence
  Description of Artificial Sequence: Synthetic oligonucleotide
ucuggagcuacggggugac

SEQ ID NO: 1435 - RNA, 19 nt, Artificial Sequence
  Description of Artificial Sequence: Synthetic oligonucleotide
ugaccaaaaucaucugugc

SEQ ID NO: 1436 - RNA, 19 nt, Artificial Sequence
  Description of Artificial Sequence: Synthetic oligonucleotide
ugaugucuggagcuacggg

SEQ ID NO: 1437 - RNA, 19 nt, Artificial Sequence
  Description of Artificial Sequence: Synthetic oligonucleotide
ugucuggagcuacggggug

SEQ ID NO: 1438 - RNA, 19 nt, Artificial Sequence
  Description of Artificial Sequence: Synthetic oligonucleotide
agauuuugggcuggccaaa

SEQ ID NO: 1439 - RNA, 19 nt, Artificial Sequence
  Description of Artificial Sequence: Synthetic oligonucleotide
auuuugggcuggccaaacu

SEQ ID NO: 1440 - RNA, 19 nt, Artificial Sequence
  Description of Artificial Sequence: Synthetic oligonucleotide
cagauuuugggcuggccaa

SEQ ID NO: 1441 - RNA, 19 nt, Artificial Sequence
  Description of Artificial Sequence: Synthetic oligonucleotide
cucaacuggugugugcaga

SEQ ID NO: 1442 - RNA, 19 nt, Artificial Sequence
  Description of Artificial Sequence: Synthetic oligonucleotide
cugcucaacuggugugugc

SEQ ID NO: 1443 - RNA, 19 nt, Artificial Sequence
  Description of Artificial Sequence: Synthetic oligonucleotide
gauuuugggcuggccaaac

SEQ ID NO: 1444 - RNA, 19 nt, Artificial Sequence
  Description of Artificial Sequence: Synthetic oligonucleotide
gcucaacuggugugugcag

SEQ ID NO: 1445 - RNA, 19 nt, Artificial Sequence
  Description of Artificial Sequence: Synthetic oligonucleotide
ucaacuggugugugcagau

SEQ ID NO: 1446 - RNA, 19 nt, Artificial Sequence
  Description of Artificial Sequence: Synthetic oligonucleotide
ugcucaacuggugugugca

SEQ ID NO: 1447 - RNA, 19 nt, Artificial Sequence
  Description of Artificial Sequence: Synthetic oligonucleotide
aaagccaacaaagaaaucu

SEQ ID NO: 1448 - RNA, 19 nt, Artificial Sequence
  Description of Artificial Sequence: Synthetic oligonucleotide
aacugguguaugcagauug

SEQ ID NO: 1449 - RNA, 19 nt, Artificial Sequence
  Description of Artificial Sequence: Synthetic oligonucleotide
aagccaacaaagaaaucuu

SEQ ID NO: 1450 - RNA, 19 nt, Artificial Sequence
  Description of Artificial Sequence: Synthetic oligonucleotide
aaggugcccaucaagugga

SEQ ID NO: 1451 - RNA, 19 nt, Artificial Sequence
  Description of Artificial Sequence: Synthetic oligonucleotide
acaucccccaaagccaaca

SEQ ID NO: 1452 - RNA, 19 nt, Artificial Sequence
  Description of Artificial Sequence: Synthetic oligonucleotide
accugcugaacugguguau

SEQ ID NO: 1453 - RNA, 19 nt, Artificial Sequence
  Description of Artificial Sequence: Synthetic oligonucleotide
acgaagcauacgugauggc

SEQ ID NO: 1454 - RNA, 19 nt, Artificial Sequence
  Description of Artificial Sequence: Synthetic oligonucleotide
acgaugcggagacugcugc

SEQ ID NO: 1455 - RNA, 19 nt, Artificial Sequence
  Description of Artificial Sequence: Synthetic oligonucleotide
acugguguaugcagauugc

SEQ ID NO: 1456 - RNA, 19 nt, Artificial Sequence
  Description of Artificial Sequence: Synthetic oligonucleotide
aggugcccaucaaguggau

SEQ ID NO: 1457 - RNA, 19 nt, Artificial Sequence
  Description of Artificial Sequence: Synthetic oligonucleotide
aucaaguggauggcgcugg

SEQ ID NO: 1458 - RNA, 19 nt, Artificial Sequence
  Description of Artificial Sequence: Synthetic oligonucleotide
augcggagacugcugcagg

SEQ ID NO: 1459 - RNA, 19 nt, Artificial Sequence
  Description of Artificial Sequence: Synthetic oligonucleotide
caaagccaacaaagaaauc

SEQ ID NO: 1460 - RNA, 19 nt, Artificial Sequence
  Description of Artificial Sequence: Synthetic oligonucleotide
caaggugcccaucaagugg

SEQ ID NO: 1461 - RNA, 19 nt, Artificial Sequence
  Description of Artificial Sequence: Synthetic oligonucleotide
cacccaccagagugaugug

SEQ ID NO: 1462 - RNA, 19 nt, Artificial Sequence
  Description of Artificial Sequence: Synthetic oligonucleotide
cacgaugcggagacugcug

SEQ ID NO: 1463 - RNA, 19 nt, Artificial Sequence
  Description of Artificial Sequence: Synthetic oligonucleotide
caucccccaaagccaacaa

SEQ ID NO: 1464 - RNA, 19 nt, Artificial Sequence
  Description of Artificial Sequence: Synthetic oligonucleotide
ccaaagccaacaaagaaau

SEQ ID NO: 1465 - RNA, 19 nt, Artificial Sequence
  Description of Artificial Sequence: Synthetic oligonucleotide
cccaaagccaacaaagaaa

SEQ ID NO: 1466 - RNA, 19 nt, Artificial Sequence
  Description of Artificial Sequence: Synthetic oligonucleotide
ccugcugaacugguguaug

SEQ ID NO: 1467 - RNA, 19 nt, Artificial Sequence
  Description of Artificial Sequence: Synthetic oligonucleotide
cgaugcggagacugcugca

SEQ ID NO: 1468 - RNA, 19 nt, Artificial Sequence
  Description of Artificial Sequence: Synthetic oligonucleotide
cugaacugguguaugcaga

SEQ ID NO: 1469 - RNA, 19 nt, Artificial Sequence
  Description of Artificial Sequence: Synthetic oligonucleotide
cugcugaacugguguaugc

SEQ ID NO: 1470 - RNA, 19 nt, Artificial Sequence
  Description of Artificial Sequence: Synthetic oligonucleotide
cugcugcaggaaacggagc

SEQ ID NO: 1471 - RNA, 19 nt, Artificial Sequence
  Description of Artificial Sequence: Synthetic oligonucleotide
gacgaagcauacgugaugg

SEQ ID NO: 1472 - RNA, 19 nt, Artificial Sequence
  Description of Artificial Sequence: Synthetic oligonucleotide
gaugcggagacugcugcag

SEQ ID NO: 1473 - RNA, 19 nt, Artificial Sequence
  Description of Artificial Sequence: Synthetic oligonucleotide
gcaaggugcccaucaagug

SEQ ID NO: 1474 - RNA, 19 nt, Artificial Sequence
  Description of Artificial Sequence: Synthetic oligonucleotide
gcccaucaaguggauggcg

SEQ ID NO: 1475 - RNA, 19 nt, Artificial Sequence
  Description of Artificial Sequence: Synthetic oligonucleotide
gcugaacugguguaugcag

SEQ ID NO: 1476 - RNA, 19 nt, Artificial Sequence
  Description of Artificial Sequence: Synthetic oligonucleotide
ggcaaggugcccaucaagu

SEQ ID NO: 1477 - RNA, 19 nt, Artificial Sequence
  Description of Artificial Sequence: Synthetic oligonucleotide
gggagcugaugacuuuugg

SEQ ID NO: 1478 - RNA, 19 nt, Artificial Sequence
  Description of Artificial Sequence: Synthetic oligonucleotide
ggugcccaucaaguggaug

SEQ ID NO: 1479 - RNA, 19 nt, Artificial Sequence
  Description of Artificial Sequence: Synthetic oligonucleotide
ucaaguggauggcgcugga

SEQ ID NO: 1480 - RNA, 19 nt, Artificial Sequence
  Description of Artificial Sequence: Synthetic oligonucleotide
ucacccaccagagugaugu

SEQ ID NO: 1481 - RNA, 19 nt, Artificial Sequence
  Description of Artificial Sequence: Synthetic oligonucleotide
ugaacugguguaugcagau

SEQ ID NO: 1482 - RNA, 19 nt, Artificial Sequence
  Description of Artificial Sequence: Synthetic oligonucleotide
ugcugaacugguguaugca

SEQ ID NO: 1483 - RNA, 19 nt, Artificial Sequence
  Description of Artificial Sequence: Synthetic oligonucleotide
ugcugcaggaaacggagcu

SEQ ID NO: 1484 - RNA, 19 nt, Artificial Sequence
  Description of Artificial Sequence: Synthetic oligonucleotide
ugggagcugaugacuuuug

SEQ ID NO: 1485 - RNA, 19 nt, Artificial Sequence
  Description of Artificial Sequence: Synthetic oligonucleotide
uucacccaccagagugaug

SEQ ID NO: 1486 - RNA, 19 nt, Artificial Sequence
  Description of Artificial Sequence: Synthetic oligonucleotide
accugcuggaaaaggggga

SEQ ID NO: 1487 - RNA, 19 nt, Artificial Sequence
  Description of Artificial Sequence: Synthetic oligonucleotide
agaucacagguuaccuaua

SEQ ID NO: 1488 - RNA, 19 nt, Artificial Sequence
  Description of Artificial Sequence: Synthetic oligonucleotide
aucacagguuaccuauaca

SEQ ID NO: 1489 - RNA, 19 nt, Artificial Sequence
  Description of Artificial Sequence: Synthetic oligonucleotide
cacagguuaccuauacauc

SEQ ID NO: 1490 - RNA, 19 nt, Artificial Sequence
  Description of Artificial Sequence: Synthetic oligonucleotide
ccugcuggaaaagggggag

SEQ ID NO: 1491 - RNA, 19 nt, Artificial Sequence
  Description of Artificial Sequence: Synthetic oligonucleotide
cugcuggaaaagggggagc

SEQ ID NO: 1492 - RNA, 19 nt, Artificial Sequence
  Description of Artificial Sequence: Synthetic oligonucleotide
gaccugcuggaaaaggggg

SEQ ID NO: 1493 - RNA, 19 nt, Artificial Sequence
  Description of Artificial Sequence: Synthetic oligonucleotide
gagaucacagguuaccuau

SEQ ID NO: 1494 - RNA, 19 nt, Artificial Sequence
  Description of Artificial Sequence: Synthetic oligonucleotide
gaucacagguuaccuauac

SEQ ID NO: 1495 - RNA, 19 nt, Artificial Sequence
  Description of Artificial Sequence: Synthetic oligonucleotide
gcuggaaaagggggagcgg

SEQ ID NO: 1496 - RNA, 19 nt, Artificial Sequence
  Description of Artificial Sequence: Synthetic oligonucleotide
ucacagguuaccuauacau

SEQ ID NO: 1497 - RNA, 19 nt, Artificial Sequence
  Description of Artificial Sequence: Synthetic oligonucleotide
ugcuggaaaagggggagcg

SEQ ID NO: 1498 - RNA, 19 nt, Artificial Sequence
  Description of Artificial Sequence: Synthetic oligonucleotide
aaauguuggaugauugacu

SEQ ID NO: 1499 - RNA, 19 nt, Artificial Sequence
  Description of Artificial Sequence: Synthetic oligonucleotide
aauguuggaugauugacuc

SEQ ID NO: 1500 - RNA, 19 nt, Artificial Sequence
  Description of Artificial Sequence: Synthetic oligonucleotide
augcugaggaguaucuggu

SEQ ID NO: 1501 - RNA, 19 nt, Artificial Sequence
  Description of Artificial Sequence: Synthetic oligonucleotide
auguuggaugauugacucu

SEQ ID NO: 1502 - RNA, 19 nt, Artificial Sequence
  Description of Artificial Sequence: Synthetic oligonucleotide
ccaucugcaccauugaugu

SEQ ID NO: 1503 - RNA, 19 nt, Artificial Sequence
  Description of Artificial Sequence: Synthetic oligonucleotide
cccaucugcaccauugaug

SEQ ID NO: 1504 - RNA, 19 nt, Artificial Sequence
  Description of Artificial Sequence: Synthetic oligonucleotide
gaugcugaggaguaucugg

SEQ ID NO: 1505 - RNA, 19 nt, Artificial Sequence
  Description of Artificial Sequence: Synthetic oligonucleotide
ggaugcugaggaguaucug

SEQ ID NO: 1506 - RNA, 19 nt, Artificial Sequence
  Description of Artificial Sequence: Synthetic oligonucleotide
guuggaugauugacucuga

SEQ ID NO: 1507 - RNA, 19 nt, Artificial Sequence
  Description of Artificial Sequence: Synthetic oligonucleotide
uggaugcugaggaguaucu

SEQ ID NO: 1508 - RNA, 19 nt, Artificial Sequence
  Description of Artificial Sequence: Synthetic oligonucleotide
uguuggaugauugacucug

SEQ ID NO: 1509 - RNA, 19 nt, Artificial Sequence
  Description of Artificial Sequence: Synthetic oligonucleotide
acacacaccagagugaugu

SEQ ID NO: 1510 - RNA, 19 nt, Artificial Sequence
  Description of Artificial Sequence: Synthetic oligonucleotide
cacacaccagagugauguc

SEQ ID NO: 1511 - RNA, 19 nt, Artificial Sequence
  Description of Artificial Sequence: Synthetic oligonucleotide
ggaguugaugaccuucggg

SEQ ID NO: 1512 - RNA, 19 nt, Artificial Sequence
  Description of Artificial Sequence: Synthetic oligonucleotide
uacacacaccagagugaug

SEQ ID NO: 1513 - RNA, 19 nt, Artificial Sequence
  Description of Artificial Sequence: Synthetic oligonucleotide
ugaccaagaccaucugugc

SEQ ID NO: 1514 - RNA, 19 nt, Artificial Sequence
  Description of Artificial Sequence: Synthetic oligonucleotide
accugcuagagaaggggga

SEQ ID NO: 1515 - RNA, 19 nt, Artificial Sequence
  Description of Artificial Sequence: Synthetic oligonucleotide
augucuggagcuauggugu

SEQ ID NO: 1516 - RNA, 19 nt, Artificial Sequence
  Description of Artificial Sequence: Synthetic oligonucleotide
ccugcuagagaagggggag

SEQ ID NO: 1517 - RNA, 19 nt, Artificial Sequence
  Description of Artificial Sequence: Synthetic oligonucleotide
cugcuagagaagggggagc

SEQ ID NO: 1518 - RNA, 19 nt, Artificial Sequence
  Description of Artificial Sequence: Synthetic oligonucleotide
gaccugcuagagaaggggg

SEQ ID NO: 1519 - RNA, 19 nt, Artificial Sequence
  Description of Artificial Sequence: Synthetic oligonucleotide
gaugucuggagcuauggug

SEQ ID NO: 1520 - RNA, 19 nt, Artificial Sequence
  Description of Artificial Sequence: Synthetic oligonucleotide
gcuagagaagggggagcgg

SEQ ID NO: 1521 - RNA, 19 nt, Artificial Sequence
  Description of Artificial Sequence: Synthetic oligonucleotide
ggagcuauggugugacagu

SEQ ID NO: 1522 - RNA, 19 nt, Artificial Sequence
  Description of Artificial Sequence: Synthetic oligonucleotide
gucuggagcuaugguguga

SEQ ID NO: 1523 - RNA, 19 nt, Artificial Sequence
  Description of Artificial Sequence: Synthetic oligonucleotide
ucuggagcuauggugugac

SEQ ID NO: 1524 - RNA, 19 nt, Artificial Sequence
  Description of Artificial Sequence: Synthetic oligonucleotide
ugaugucuggagcuauggu

SEQ ID NO: 1525 - RNA, 19 nt, Artificial Sequence
  Description of Artificial Sequence: Synthetic oligonucleotide
ugcuagagaagggggagcg

SEQ ID NO: 1526 - RNA, 19 nt, Artificial Sequence
  Description of Artificial Sequence: Synthetic oligonucleotide
uggagcuauggugugacag

SEQ ID NO: 1527 - RNA, 19 nt, Artificial Sequence
  Description of Artificial Sequence: Synthetic oligonucleotide
ugucuggagcuauggugug

SEQ ID NO: 1528 - RNA, 19 nt, Artificial Sequence
  Description of Artificial Sequence: Synthetic oligonucleotide
aagauggaaguagauaaaa

SEQ ID NO: 1529 - RNA, 19 nt, Artificial Sequence
  Description of Artificial Sequence: Synthetic oligonucleotide
accucuccuuccugcagug

SEQ ID NO: 1530 - RNA, 19 nt, Artificial Sequence
  Description of Artificial Sequence: Synthetic oligonucleotide
caagauggaaguagauaaa

SEQ ID NO: 1531 - RNA, 19 nt, Artificial Sequence
  Description of Artificial Sequence: Synthetic oligonucleotide
caauuaaguggauggcccu

SEQ ID NO: 1532 - RNA, 19 nt, Artificial Sequence
  Description of Artificial Sequence: Synthetic oligonucleotide
cacagcugcugcucaacug

SEQ ID NO: 1533 - RNA, 19 nt, Artificial Sequence
  Description of Artificial Sequence: Synthetic oligonucleotide
cacuucaaugacaguggag

SEQ ID NO: 1534 - RNA, 19 nt, Artificial Sequence
  Description of Artificial Sequence: Synthetic oligonucleotide
ccaggauggcccgagaccc

SEQ ID NO: 1535 - RNA, 19 nt, Artificial Sequence
  Description of Artificial Sequence: Synthetic oligonucleotide
cgaccucuccuuccugcag

SEQ ID NO: 1536 - RNA, 19 nt, Artificial Sequence
  Description of Artificial Sequence: Synthetic oligonucleotide
gauggaaguagauaaaaau

SEQ ID NO: 1537 - RNA, 19 nt, Artificial Sequence
  Description of Artificial Sequence: Synthetic oligonucleotide
gcacuucaaugacagugga

SEQ ID NO: 1538 - RNA, 19 nt, Artificial Sequence
  Description of Artificial Sequence: Synthetic oligonucleotide
ggaaguagauaaaaauggg

SEQ ID NO: 1539 - RNA, 19 nt, Artificial Sequence
  Description of Artificial Sequence: Synthetic oligonucleotide
gucuacauggugaugguca

SEQ ID NO: 1540 - RNA, 19 nt, Artificial Sequence
  Description of Artificial Sequence: Synthetic oligonucleotide
uccgaucccugaaggaaau

SEQ ID NO: 1541 - RNA, 19 nt, Artificial Sequence
  Description of Artificial Sequence: Synthetic oligonucleotide
ucuacauggugauggucaa

SEQ ID NO: 1542 - RNA, 19 nt, Artificial Sequence
  Description of Artificial Sequence: Synthetic oligonucleotide
uggaaguagauaaaaaugg

SEQ ID NO: 1543 - RNA, 19 nt, Artificial Sequence
  Description of Artificial Sequence: Synthetic oligonucleotide
ugugccgggggcugcucag

SEQ ID NO: 1544 - RNA, 19 nt, Artificial Sequence
  Description of Artificial Sequence: Synthetic oligonucleotide
agagugacguuuggagcua

SEQ ID NO: 1545 - RNA, 19 nt, Artificial Sequence
  Description of Artificial Sequence: Synthetic oligonucleotide
agauuuugggcuagccaga

SEQ ID NO: 1546 - RNA, 19 nt, Artificial Sequence
  Description of Artificial Sequence: Synthetic oligonucleotide
auccaaacugcacccaagg

SEQ ID NO: 1547 - RNA, 19 nt, Artificial Sequence
  Description of Artificial Sequence: Synthetic oligonucleotide
augugaaaaucacagauuu

SEQ ID NO: 1548 - RNA, 19 nt, Artificial Sequence
  Description of Artificial Sequence: Synthetic oligonucleotide
auuuugggcuagccagacu

SEQ ID NO: 1549 - RNA, 19 nt, Artificial Sequence
  Description of Artificial Sequence: Synthetic oligonucleotide
cagagugacguuuggagcu

SEQ ID NO: 1550 - RNA, 19 nt, Artificial Sequence
  Description of Artificial Sequence: Synthetic oligonucleotide
cagauuuugggcuagccag

SEQ ID NO: 1551 - RNA, 19 nt, Artificial Sequence
  Description of Artificial Sequence: Synthetic oligonucleotide
cauccaaacugcacccaag

SEQ ID NO: 1552 - RNA, 19 nt, Artificial Sequence
  Description of Artificial Sequence: Synthetic oligonucleotide
caugugaaaaucacagauu

SEQ ID NO: 1553 - RNA, 19 nt, Artificial Sequence
  Description of Artificial Sequence: Synthetic oligonucleotide
ccaaacugcacccaagggu

SEQ ID NO: 1554 - RNA, 19 nt, Artificial Sequence
  Description of Artificial Sequence: Synthetic oligonucleotide
ccauccaaacugcacccaa

SEQ ID NO: 1555 - RNA, 19 nt, Artificial Sequence
  Description of Artificial Sequence: Synthetic oligonucleotide
gaaaaucacagauuuuggg

SEQ ID NO: 1556 - RNA, 19 nt, Artificial Sequence
  Description of Artificial Sequence: Synthetic oligonucleotide
gauuuugggcuagccagac

SEQ ID NO: 1557 - RNA, 19 nt, Artificial Sequence
  Description of Artificial Sequence: Synthetic oligonucleotide
gugaaaaucacagauuuug

SEQ ID NO: 1558 - RNA, 19 nt, Artificial Sequence
  Description of Artificial Sequence: Synthetic oligonucleotide
uccaaacugcacccaaggg

SEQ ID NO: 1559 - RNA, 19 nt, Artificial Sequence
  Description of Artificial Sequence: Synthetic oligonucleotide
ugaaaaucacagauuuugg

SEQ ID NO: 1560 - RNA, 19 nt, Artificial Sequence
  Description of Artificial Sequence: Synthetic oligonucleotide
ugugaaaaucacagauuuu

SEQ ID NO: 1561 - RNA, 19 nt, Artificial Sequence
  Description of Artificial Sequence: Synthetic oligonucleotide
aaauggauggcucuggagu

SEQ ID NO: 1562 - RNA, 19 nt, Artificial Sequence
  Description of Artificial Sequence: Synthetic oligonucleotide
aaccaugugaaaaucacag

SEQ ID NO: 1563 - RNA, 19 nt, Artificial Sequence
  Description of Artificial Sequence: Synthetic oligonucleotide
accaugugaaaaucacaga

SEQ ID NO: 1564 - RNA, 19 nt, Artificial Sequence
  Description of Artificial Sequence: Synthetic oligonucleotide
augauggaugcugaggagu

SEQ ID NO: 1565 - RNA, 19 nt, Artificial Sequence
  Description of Artificial Sequence: Synthetic oligonucleotide
augccccauggcugccugu

SEQ ID NO: 1566 - RNA, 19 nt, Artificial Sequence
  Description of Artificial Sequence: Synthetic oligonucleotide
augcugaggaguacuuggu

SEQ ID NO: 1567 - RNA, 19 nt, Artificial Sequence
  Description of Artificial Sequence: Synthetic oligonucleotide
ccaucugcacuauugacgu

SEQ ID NO: 1568 - RNA, 19 nt, Artificial Sequence
  Description of Artificial Sequence: Synthetic oligonucleotide
cccaucugcacuauugacg

SEQ ID NO: 1569 - RNA, 19 nt, Artificial Sequence
  Description of Artificial Sequence: Synthetic oligonucleotide
gaugcugaggaguacuugg

SEQ ID NO: 1570 - RNA, 19 nt, Artificial Sequence
  Description of Artificial Sequence: Synthetic oligonucleotide
ggaugcugaggaguacuug

SEQ ID NO: 1571 - RNA, 19 nt, Artificial Sequence
  Description of Artificial Sequence: Synthetic oligonucleotide
uaugccccauggcugccug

SEQ ID NO: 1572 - RNA, 19 nt, Artificial Sequence
  Description of Artificial Sequence: Synthetic oligonucleotide
ucacccaucagagugacgu

SEQ ID NO: 1573 - RNA, 19 nt, Artificial Sequence
  Description of Artificial Sequence: Synthetic oligonucleotide
ugccccauggcugccuguu

SEQ ID NO: 1574 - RNA, 19 nt, Artificial Sequence
  Description of Artificial Sequence: Synthetic oligonucleotide
uggaugcugaggaguacuu

SEQ ID NO: 1575 - RNA, 19 nt, Artificial Sequence
  Description of Artificial Sequence: Synthetic oligonucleotide
uucacccaucagagugacg

SEQ ID NO: 1576 - RNA, 19 nt, Artificial Sequence
  Description of Artificial Sequence: Synthetic oligonucleotide
uuuuuuguuuuauuuuugu

SEQ ID NO: 1577 - RNA, 19 nt, Artificial Sequence
  Description of Artificial Sequence: Synthetic oligonucleotide
aaaguccuuggcucaggug

SEQ ID NO: 1578 - RNA, 19 nt, Artificial Sequence
  Description of Artificial Sequence: Synthetic oligonucleotide
aauguuggaugauugaugc

SEQ ID NO: 1579 - RNA, 19 nt, Artificial Sequence
  Description of Artificial Sequence: Synthetic oligonucleotide
acaacugcugcuuaacugg

SEQ ID NO: 1580 - RNA, 19 nt, Artificial Sequence
  Description of Artificial Sequence: Synthetic oligonucleotide
acauaacuuugugguagau

SEQ ID NO: 1581 - RNA, 19 nt, Artificial Sequence
  Description of Artificial Sequence: Synthetic oligonucleotide
agugacguuuggagcuaug

SEQ ID NO: 1582 - RNA, 19 nt, Artificial Sequence
  Description of Artificial Sequence: Synthetic oligonucleotide
caauuaaauggauggcucu

SEQ ID NO: 1583 - RNA, 19 nt, Artificial Sequence
  Description of Artificial Sequence: Synthetic oligonucleotide
cacaacugcugcuuaacug

SEQ ID NO: 1584 - RNA, 19 nt, Artificial Sequence
  Description of Artificial Sequence: Synthetic oligonucleotide
cacauaacuuugugguaga

SEQ ID NO: 1585 - RNA, 19 nt, Artificial Sequence
  Description of Artificial Sequence: Synthetic oligonucleotide
cauaacuuugugguagauu

SEQ ID NO: 1586 - RNA, 19 nt, Artificial Sequence
  Description of Artificial Sequence: Synthetic oligonucleotide
ccaauuaaauggauggcuc

SEQ ID NO: 1587 - RNA, 19 nt, Artificial Sequence
  Description of Artificial Sequence: Synthetic oligonucleotide
ccacauaacuuugugguag

SEQ ID NO: 1588 - RNA, 19 nt, Artificial Sequence
  Description of Artificial Sequence: Synthetic oligonucleotide
cgagaagucacaggcuacg

SEQ ID NO: 1589 - RNA, 19 nt, Artificial Sequence
  Description of Artificial Sequence: Synthetic oligonucleotide
cugcacccaaggguguaac

SEQ ID NO: 1590 - RNA, 19 nt, Artificial Sequence
  Description of Artificial Sequence: Synthetic oligonucleotide
cuucaguguuuuuucuaac

SEQ ID NO: 1591 - RNA, 19 nt, Artificial Sequence
  Description of Artificial Sequence: Synthetic oligonucleotide
gagaagucacaggcuacgu

SEQ ID NO: 1592 - RNA, 19 nt, Artificial Sequence
  Description of Artificial Sequence: Synthetic oligonucleotide
gagugacguuuggagcuau

SEQ ID NO: 1593 - RNA, 19 nt, Artificial Sequence
  Description of Artificial Sequence: Synthetic oligonucleotide
gcacccaaggguguaacgg

SEQ ID NO: 1594 - RNA, 19 nt, Artificial Sequence
  Description of Artificial Sequence: Synthetic oligonucleotide
gugacguuuggagcuaugg

SEQ ID NO: 1595 - RNA, 19 nt, Artificial Sequence
  Description of Artificial Sequence: Synthetic oligonucleotide
gugcuggaggcugcucagg

SEQ ID NO: 1596 - RNA, 19 nt, Artificial Sequence
  Description of Artificial Sequence: Synthetic oligonucleotide
uccacauaacuuuguggua

SEQ ID NO: 1597 - RNA, 19 nt, Artificial Sequence
  Description of Artificial Sequence: Synthetic oligonucleotide
uccagucccugaaggaaau

SEQ ID NO: 1598 - RNA, 19 nt, Artificial Sequence
  Description of Artificial Sequence: Synthetic oligonucleotide
ucgagaagucacaggcuac

SEQ ID NO: 1599 - RNA, 19 nt, Artificial Sequence
  Description of Artificial Sequence: Synthetic oligonucleotide
ugcacccaaggguguaacg

SEQ ID NO: 1600 - RNA, 19 nt, Artificial Sequence
  Description of Artificial Sequence: Synthetic oligonucleotide
ugugcuggaggcugcucag

SEQ ID NO: 1601 - RNA, 19 nt, Artificial Sequence
  Description of Artificial Sequence: Synthetic oligonucleotide
uuccagucccugaaggaaa

SEQ ID NO: 1602 - RNA, 19 nt, Artificial Sequence
  Description of Artificial Sequence: Synthetic oligonucleotide
acaucuccgaaagccaaca

SEQ ID NO: 1603 - RNA, 19 nt, Artificial Sequence
  Description of Artificial Sequence: Synthetic oligonucleotide
accagugugcugcaggcug

SEQ ID NO: 1604 - RNA, 19 nt, Artificial Sequence
  Description of Artificial Sequence: Synthetic oligonucleotide
accugcucaacuggugugu

SEQ ID NO: 1605 - RNA, 19 nt, Artificial Sequence
  Description of Artificial Sequence: Synthetic oligonucleotide
acgcugcggaggcugcugc

SEQ ID NO: 1606 - RNA, 19 nt, Artificial Sequence
  Description of Artificial Sequence: Synthetic oligonucleotide
aguaccugcucaacuggug

SEQ ID NO: 1607 - RNA, 19 nt, Artificial Sequence
  Description of Artificial Sequence: Synthetic oligonucleotide
auacccaccagagugaugu

SEQ ID NO: 1608 - RNA, 19 nt, Artificial Sequence
  Description of Artificial Sequence: Synthetic oligonucleotide
augaagccuacgugauggc

SEQ ID NO: 1609 - RNA, 19 nt, Artificial Sequence
  Description of Artificial Sequence: Synthetic oligonucleotide
cacagcagggcuucuucag

SEQ ID NO: 1610 - RNA, 19 nt, Artificial Sequence
  Description of Artificial Sequence: Synthetic oligonucleotide
cacgcugcggaggcugcug

SEQ ID NO: 1611 - RNA, 19 nt, Artificial Sequence
  Description of Artificial Sequence: Synthetic oligonucleotide
caguaccugcucaacuggu

SEQ ID NO: 1612 - RNA, 19 nt, Artificial Sequence
  Description of Artificial Sequence: Synthetic oligonucleotide
caucuccgaaagccaacaa

SEQ ID NO: 1613 - RNA, 19 nt, Artificial Sequence
  Description of Artificial Sequence: Synthetic oligonucleotide
ccacagcagggcuucuuca

SEQ ID NO: 1614 - RNA, 19 nt, Artificial Sequence
  Description of Artificial Sequence: Synthetic oligonucleotide
ccaguaccugcucaacugg

SEQ ID NO: 1615 - RNA, 19 nt, Artificial Sequence
  Description of Artificial Sequence: Synthetic oligonucleotide
ccagugugcugcaggcugc

SEQ ID NO: 1616 - RNA, 19 nt, Artificial Sequence
  Description of Artificial Sequence: Synthetic oligonucleotide
cccacagcagggcuucuuc

SEQ ID NO: 1617 - RNA, 19 nt, Artificial Sequence
  Description of Artificial Sequence: Synthetic oligonucleotide
cccaguaccugcucaacug

SEQ ID NO: 1618 - RNA, 19 nt, Artificial Sequence
  Description of Artificial Sequence: Synthetic oligonucleotide
ccgaaagccaacaaggaaa

SEQ ID NO: 1619 - RNA, 19 nt, Artificial Sequence
  Description of Artificial Sequence: Synthetic oligonucleotide
ccugcucaacuggugugug

SEQ ID NO: 1620 - RNA, 19 nt, Artificial Sequence
  Description of Artificial Sequence: Synthetic oligonucleotide
ccugcugggcaucugccuc

SEQ ID NO: 1621 - RNA, 19 nt, Artificial Sequence
  Description of Artificial Sequence: Synthetic oligonucleotide
cgaaagccaacaaggaaau

SEQ ID NO: 1622 - RNA, 19 nt, Artificial Sequence
  Description of Artificial Sequence: Synthetic oligonucleotide
cgcugcggaggcugcugca

SEQ ID NO: 1623 - RNA, 19 nt, Artificial Sequence
  Description of Artificial Sequence: Synthetic oligonucleotide
cggaggcugcugcaggaga

SEQ ID NO: 1624 - RNA, 19 nt, Artificial Sequence
  Description of Artificial Sequence: Synthetic oligonucleotide
cucccaguaccugcucaac

SEQ ID NO: 1625 - RNA, 19 nt, Artificial Sequence
  Description of Artificial Sequence: Synthetic oligonucleotide
cugcggaggcugcugcagg

SEQ ID NO: 1626 - RNA, 19 nt, Artificial Sequence
  Description of Artificial Sequence: Synthetic oligonucleotide
cugcugcaggagagggagc

SEQ ID NO: 1627 - RNA, 19 nt, Artificial Sequence
  Description of Artificial Sequence: Synthetic oligonucleotide
cugcugggcaucugccuca

SEQ ID NO: 1628 - RNA, 19 nt, Artificial Sequence
  Description of Artificial Sequence: Synthetic oligonucleotide
cugggcaucugccucaccu

SEQ ID NO: 1629 - RNA, 19 nt, Artificial Sequence
  Description of Artificial Sequence: Synthetic oligonucleotide
gaaagccaacaaggaaauc

SEQ ID NO: 1630 - RNA, 19 nt, Artificial Sequence
  Description of Artificial Sequence: Synthetic oligonucleotide
gaugaagccuacgugaugg

SEQ ID NO: 1631 - RNA, 19 nt, Artificial Sequence
  Description of Artificial Sequence: Synthetic oligonucleotide
gcaucugccucaccuccac

SEQ ID NO: 1632 - RNA, 19 nt, Artificial Sequence
  Description of Artificial Sequence: Synthetic oligonucleotide
gccgccugcugggcaucug

SEQ ID NO: 1633 - RNA, 19 nt, Artificial Sequence
  Description of Artificial Sequence: Synthetic oligonucleotide
gcggaggcugcugcaggag

SEQ ID NO: 1634 - RNA, 19 nt, Artificial Sequence
  Description of Artificial Sequence: Synthetic oligonucleotide
gcucccaguaccugcucaa

SEQ ID NO: 1635 - RNA, 19 nt, Artificial Sequence
  Description of Artificial Sequence: Synthetic oligonucleotide
gcugcggaggcugcugcag

SEQ ID NO: 1636 - RNA, 19 nt, Artificial Sequence
  Description of Artificial Sequence: Synthetic oligonucleotide
ggcaucugccucaccucca

SEQ ID NO: 1637 - RNA, 19 nt, Artificial Sequence
  Description of Artificial Sequence: Synthetic oligonucleotide
ggcucccaguaccugcuca

SEQ ID NO: 1638 - RNA, 19 nt, Artificial Sequence
  Description of Artificial Sequence: Synthetic oligonucleotide
gggcaucugccucaccucc

SEQ ID NO: 1639 - RNA, 19 nt, Artificial Sequence
  Description of Artificial Sequence: Synthetic oligonucleotide
guaccugcucaacuggugu

SEQ ID NO: 1640 - RNA, 19 nt, Artificial Sequence
  Description of Artificial Sequence: Synthetic oligonucleotide
uacccaccagagugauguc

SEQ ID NO: 1641 - RNA, 19 nt, Artificial Sequence
  Description of Artificial Sequence: Synthetic oligonucleotide
uauacccaccagagugaug

SEQ ID NO: 1642 - RNA, 19 nt, Artificial Sequence
  Description of Artificial Sequence: Synthetic oligonucleotide
ucccacagcagggcuucuu

SEQ ID NO: 1643 - RNA, 19 nt, Artificial Sequence
  Description of Artificial Sequence: Synthetic oligonucleotide
ucccaguaccugcucaacu

SEQ ID NO: 1644 - RNA, 19 nt, Artificial Sequence
  Description of Artificial Sequence: Synthetic oligonucleotide
ugccgccugcugggcaucu

SEQ ID NO: 1645 - RNA, 19 nt, Artificial Sequence
  Description of Artificial Sequence: Synthetic oligonucleotide
ugcugcaggagagggagcu

SEQ ID NO: 1646 - RNA, 19 nt, Artificial Sequence
  Description of Artificial Sequence: Synthetic oligonucleotide
ugcugggcaucugccucac

SEQ ID NO: 1647 - RNA, 19 nt, Artificial Sequence
  Description of Artificial Sequence: Synthetic oligonucleotide
ugggcaucugccucaccuc

SEQ ID NO: 1648 - RNA, 19 nt, Artificial Sequence
  Description of Artificial Sequence: Synthetic oligonucleotide
uuggcucccaguaccugcu

SEQ ID NO: 1649 - RNA, 19 nt, Artificial Sequence
  Description of Artificial Sequence: Synthetic oligonucleotide
aaagugcugggcuccggug

SEQ ID NO: 1650 - RNA, 19 nt, Artificial Sequence
  Description of Artificial Sequence: Synthetic oligonucleotide
ggggugaccguuugggagu

SEQ ID NO: 1651 - RNA, 19 nt, Artificial Sequence
  Description of Artificial Sequence: Synthetic oligonucleotide
gggugaccguuugggaguu

SEQ ID NO: 1652 - RNA, 19 nt, Artificial Sequence
  Description of Artificial Sequence: Synthetic oligonucleotide
ggugaccguuugggaguug

SEQ ID NO: 1653 - RNA, 19 nt, Artificial Sequence
  Description of Artificial Sequence: Synthetic oligonucleotide
acccugacuaccagcagga

SEQ ID NO: 1654 - RNA, 19 nt, Artificial Sequence
  Description of Artificial Sequence: Synthetic oligonucleotide
accugugccauccaaacug

SEQ ID NO: 1655 - RNA, 19 nt, Artificial Sequence
  Description of Artificial Sequence: Synthetic oligonucleotide
auccaaacugcaccuacgg

SEQ ID NO: 1656 - RNA, 19 nt, Artificial Sequence
  Description of Artificial Sequence: Synthetic oligonucleotide
augucaagaucacagauuu

SEQ ID NO: 1657 - RNA, 19 nt, Artificial Sequence
  Description of Artificial Sequence: Synthetic oligonucleotide
caagaucacagauuuuggg

SEQ ID NO: 1658 - RNA, 19 nt, Artificial Sequence
  Description of Artificial Sequence: Synthetic oligonucleotide
caccugugccauccaaacu

SEQ ID NO: 1659 - RNA, 19 nt, Artificial Sequence
  Description of Artificial Sequence: Synthetic oligonucleotide
cauccaaacugcaccuacg

SEQ ID NO: 1660 - RNA, 19 nt, Artificial Sequence
  Description of Artificial Sequence: Synthetic oligonucleotide
caugucaagaucacagauu

SEQ ID NO: 1661 - RNA, 19 nt, Artificial Sequence
  Description of Artificial Sequence: Synthetic oligonucleotide
ccaaacugcaccuacgggu

SEQ ID NO: 1662 - RNA, 19 nt, Artificial Sequence
  Description of Artificial Sequence: Synthetic oligonucleotide
ccaccugugccauccaaac

SEQ ID NO: 1663 - RNA, 19 nt, Artificial Sequence
  Description of Artificial Sequence: Synthetic oligonucleotide
ccauccaaacugcaccuac

SEQ ID NO: 1664 - RNA, 19 nt, Artificial Sequence
  Description of Artificial Sequence: Synthetic oligonucleotide
ccugugccauccaaacugc

SEQ ID NO: 1665 - RNA, 19 nt, Artificial Sequence
  Description of Artificial Sequence: Synthetic oligonucleotide
cugugccauccaaacugca

SEQ ID NO: 1666 - RNA, 19 nt, Artificial Sequence
  Description of Artificial Sequence: Synthetic oligonucleotide
gaucacagauuuugggcug

SEQ ID NO: 1667 - RNA, 19 nt, Artificial Sequence
  Description of Artificial Sequence: Synthetic oligonucleotide
gccaccugugccauccaaa

SEQ ID NO: 1668 - RNA, 19 nt, Artificial Sequence
  Description of Artificial Sequence: Synthetic oligonucleotide
gucaagaucacagauuuug

SEQ ID NO: 1669 - RNA, 19 nt, Artificial Sequence
  Description of Artificial Sequence: Synthetic oligonucleotide
gugccaccugugccaucca

SEQ ID NO: 1670 - RNA, 19 nt, Artificial Sequence
  Description of Artificial Sequence: Synthetic oligonucleotide
ucaagaucacagauuuugg

SEQ ID NO: 1671 - RNA, 19 nt, Artificial Sequence
  Description of Artificial Sequence: Synthetic oligonucleotide
uccaaacugcaccuacggg

SEQ ID NO: 1672 - RNA, 19 nt, Artificial Sequence
  Description of Artificial Sequence: Synthetic oligonucleotide
ugccaccugugccauccaa

SEQ ID NO: 1673 - RNA, 19 nt, Artificial Sequence
  Description of Artificial Sequence: Synthetic oligonucleotide
ugucaagaucacagauuuu

SEQ ID NO: 1674 - RNA, 19 nt, Artificial Sequence
  Description of Artificial Sequence: Synthetic oligonucleotide
ugugccauccaaacugcac

SEQ ID NO: 1675 - RNA, 19 nt, Artificial Sequence
  Description of Artificial Sequence: Synthetic oligonucleotide
accaugcagaugggggcaa

SEQ ID NO: 1676 - RNA, 19 nt, Artificial Sequence
  Description of Artificial Sequence: Synthetic oligonucleotide
accccagcagggcuucuuc

SEQ ID NO: 1677 - RNA, 19 nt, Artificial Sequence
  Description of Artificial Sequence: Synthetic oligonucleotide
agacagaguaccaugcaga

SEQ ID NO: 1678 - RNA, 19 nt, Artificial Sequence
  Description of Artificial Sequence: Synthetic oligonucleotide
agagugauguguggaguua

SEQ ID NO: 1679 - RNA, 19 nt, Artificial Sequence
  Description of Artificial Sequence: Synthetic oligonucleotide
agcagugugcugccggcug

SEQ ID NO: 1680 - RNA, 19 nt, Artificial Sequence
  Description of Artificial Sequence: Synthetic oligonucleotide
aggaccugcugaacuggug

SEQ ID NO: 1681 - RNA, 19 nt, Artificial Sequence
  Description of Artificial Sequence: Synthetic oligonucleotide
auggccagggacccccagc

SEQ ID NO: 1682 - RNA, 19 nt, Artificial Sequence
  Description of Artificial Sequence: Synthetic oligonucleotide
cagagugauguguggaguu

SEQ ID NO: 1683 - RNA, 19 nt, Artificial Sequence
  Description of Artificial Sequence: Synthetic oligonucleotide
caggaccugcugaacuggu

SEQ ID NO: 1684 - RNA, 19 nt, Artificial Sequence
  Description of Artificial Sequence: Synthetic oligonucleotide
ccagagugauguguggagu

SEQ ID NO: 1685 - RNA, 19 nt, Artificial Sequence
  Description of Artificial Sequence: Synthetic oligonucleotide
ccaggaccugcugaacugg

SEQ ID NO: 1686 - RNA, 19 nt, Artificial Sequence
  Description of Artificial Sequence: Synthetic oligonucleotide
cccagcagggcuucuucug

SEQ ID NO: 1687 - RNA, 19 nt, Artificial Sequence
  Description of Artificial Sequence: Synthetic oligonucleotide
cccaggaccugcugaacug

SEQ ID NO: 1688 - RNA, 19 nt, Artificial Sequence
  Description of Artificial Sequence: Synthetic oligonucleotide
ccccagcagggcuucuucu

SEQ ID NO: 1689 - RNA, 19 nt, Artificial Sequence
  Description of Artificial Sequence: Synthetic oligonucleotide
cccgccuucugggcaucug

SEQ ID NO: 1690 - RNA, 19 nt, Artificial Sequence
  Description of Artificial Sequence: Synthetic oligonucleotide
ccuucugggcaucugccug

SEQ ID NO: 1691 - RNA, 19 nt, Artificial Sequence
  Description of Artificial Sequence: Synthetic oligonucleotide
cucccaggaccugcugaac

SEQ ID NO: 1692 - RNA, 19 nt, Artificial Sequence
  Description of Artificial Sequence: Synthetic oligonucleotide
cugccggcugcacgggccc

SEQ ID NO: 1693 - RNA, 19 nt, Artificial Sequence
  Description of Artificial Sequence: Synthetic oligonucleotide
cugggcaucugccugacau

SEQ ID NO: 1694 - RNA, 19 nt, Artificial Sequence
  Description of Artificial Sequence: Synthetic oligonucleotide
cuucugggcaucugccuga

SEQ ID NO: 1695 - RNA, 19 nt, Artificial Sequence
  Description of Artificial Sequence: Synthetic oligonucleotide
gagacagaguaccaugcag

SEQ ID NO: 1696 - RNA, 19 nt, Artificial Sequence
  Description of Artificial Sequence: Synthetic oligonucleotide
gcagugugcugccggcugc

SEQ ID NO: 1697 - RNA, 19 nt, Artificial Sequence
  Description of Artificial Sequence: Synthetic oligonucleotide
gcaucugccugacauccac

SEQ ID NO: 1698 - RNA, 19 nt, Artificial Sequence
  Description of Artificial Sequence: Synthetic oligonucleotide
gccagggacccccagcgcu

SEQ ID NO: 1699 - RNA, 19 nt, Artificial Sequence
  Description of Artificial Sequence: Synthetic oligonucleotide
gcucccaggaccugcugaa

SEQ ID NO: 1700 - RNA, 19 nt, Artificial Sequence
  Description of Artificial Sequence: Synthetic oligonucleotide
gcugccggcugcacgggcc

SEQ ID NO: 1701 - RNA, 19 nt, Artificial Sequence
  Description of Artificial Sequence: Synthetic oligonucleotide
ggaccugcugaacuggugu

SEQ ID NO: 1702 - RNA, 19 nt, Artificial Sequence
  Description of Artificial Sequence: Synthetic oligonucleotide
ggcaucugccugacaucca

SEQ ID NO: 1703 - RNA, 19 nt, Artificial Sequence
  Description of Artificial Sequence: Synthetic oligonucleotide
ggccagggacccccagcgc

SEQ ID NO: 1704 - RNA, 19 nt, Artificial Sequence
  Description of Artificial Sequence: Synthetic oligonucleotide
ggcucccaggaccugcuga

SEQ ID NO: 1705 - RNA, 19 nt, Artificial Sequence
  Description of Artificial Sequence: Synthetic oligonucleotide
gggcaucugccugacaucc

SEQ ID NO: 1706 - RNA, 19 nt, Artificial Sequence
  Description of Artificial Sequence: Synthetic oligonucleotide
gugcugccggcugcacggg

SEQ ID NO: 1707 - RNA, 19 nt, Artificial Sequence
  Description of Artificial Sequence: Synthetic oligonucleotide
gugugcugccggcugcacg

SEQ ID NO: 1708 - RNA, 19 nt, Artificial Sequence
  Description of Artificial Sequence: Synthetic oligonucleotide
uaccaugcagaugggggca

SEQ ID NO: 1709 - RNA, 19 nt, Artificial Sequence
  Description of Artificial Sequence: Synthetic oligonucleotide
uaccccagcagggcuucuu

SEQ ID NO: 1710 - RNA, 19 nt, Artificial Sequence
  Description of Artificial Sequence: Synthetic oligonucleotide
ucccaggaccugcugaacu

SEQ ID NO: 1711 - RNA, 19 nt, Artificial Sequence
  Description of Artificial Sequence: Synthetic oligonucleotide
ucccgccuucugggcaucu

SEQ ID NO: 1712 - RNA, 19 nt, Artificial Sequence
  Description of Artificial Sequence: Synthetic oligonucleotide
ugccggcugcacgggcccc

SEQ ID NO: 1713 - RNA, 19 nt, Artificial Sequence
  Description of Artificial Sequence: Synthetic oligonucleotide
ugcugccggcugcacgggc

SEQ ID NO: 1714 - RNA, 19 nt, Artificial Sequence
  Description of Artificial Sequence: Synthetic oligonucleotide
uggccagggacccccagcg

SEQ ID NO: 1715 - RNA, 19 nt, Artificial Sequence
  Description of Artificial Sequence: Synthetic oligonucleotide
ugggcaucugccugacauc

SEQ ID NO: 1716 - RNA, 19 nt, Artificial Sequence
  Description of Artificial Sequence: Synthetic oligonucleotide
ugggcucccaggaccugcu

SEQ ID NO: 1717 - RNA, 19 nt, Artificial Sequence
  Description of Artificial Sequence: Synthetic oligonucleotide
ugugcugccggcugcacgg

SEQ ID NO: 1718 - RNA, 19 nt, Artificial Sequence
  Description of Artificial Sequence: Synthetic oligonucleotide
uucugggcaucugccugac

SEQ ID NO: 1719 - RNA, 19 nt, Artificial Sequence
  Description of Artificial Sequence: Synthetic oligonucleotide
aaagagacggagcugagga

SEQ ID NO: 1720 - RNA, 19 nt, Artificial Sequence
  Description of Artificial Sequence: Synthetic oligonucleotide
aagagacggagcugaggaa

SEQ ID NO: 1721 - RNA, 19 nt, Artificial Sequence
  Description of Artificial Sequence: Synthetic oligonucleotide
agagacggagcugaggaag

SEQ ID NO: 1722 - RNA, 19 nt, Artificial Sequence
  Description of Artificial Sequence: Synthetic oligonucleotide
agugauguguggaguuaug

SEQ ID NO: 1723 - RNA, 19 nt, Artificial Sequence
  Description of Artificial Sequence: Synthetic oligonucleotide
auggugugacuguguggga

SEQ ID NO: 1724 - RNA, 19 nt, Artificial Sequence
  Description of Artificial Sequence: Synthetic oligonucleotide
auguguggaguuauggugu

SEQ ID NO: 1725 - RNA, 19 nt, Artificial Sequence
  Description of Artificial Sequence: Synthetic oligonucleotide
caucugcaccauugauguc

SEQ ID NO: 1726 - RNA, 19 nt, Artificial Sequence
  Description of Artificial Sequence: Synthetic oligonucleotide
gagugauguguggaguuau

SEQ ID NO: 1727 - RNA, 19 nt, Artificial Sequence
  Description of Artificial Sequence: Synthetic oligonucleotide
gauguguggaguuauggug

SEQ ID NO: 1728 - RNA, 19 nt, Artificial Sequence
  Description of Artificial Sequence: Synthetic oligonucleotide
gcugccaugagcagugugc

SEQ ID NO: 1729 - RNA, 19 nt, Artificial Sequence
  Description of Artificial Sequence: Synthetic oligonucleotide
ggaguuauggugugacugu

SEQ ID NO: 1730 - RNA, 19 nt, Artificial Sequence
  Description of Artificial Sequence: Synthetic oligonucleotide
gugauguguggaguuaugg

SEQ ID NO: 1731 - RNA, 19 nt, Artificial Sequence
  Description of Artificial Sequence: Synthetic oligonucleotide
gugcgaggcacccagcucu

SEQ ID NO: 1732 - RNA, 19 nt, Artificial Sequence
  Description of Artificial Sequence: Synthetic oligonucleotide
guguggaguuaugguguga

SEQ ID NO: 1733 - RNA, 19 nt, Artificial Sequence
  Description of Artificial Sequence: Synthetic oligonucleotide
uauggugugacuguguggg

SEQ ID NO: 1734 - RNA, 19 nt, Artificial Sequence
  Description of Artificial Sequence: Synthetic oligonucleotide
ugaagaugaugaggaugaa

SEQ ID NO: 1735 - RNA, 19 nt, Artificial Sequence
  Description of Artificial Sequence: Synthetic oligonucleotide
ugauguguggaguuauggu

SEQ ID NO: 1736 - RNA, 19 nt, Artificial Sequence
  Description of Artificial Sequence: Synthetic oligonucleotide
ugcugccaugagcagugug

SEQ ID NO: 1737 - RNA, 19 nt, Artificial Sequence
  Description of Artificial Sequence: Synthetic oligonucleotide
uggaguuauggugugacug

SEQ ID NO: 1738 - RNA, 19 nt, Artificial Sequence
  Description of Artificial Sequence: Synthetic oligonucleotide
uggugugacugugugggag

SEQ ID NO: 1739 - RNA, 19 nt, Artificial Sequence
  Description of Artificial Sequence: Synthetic oligonucleotide
uguggaguuauggugugac

SEQ ID NO: 1740 - RNA, 19 nt, Artificial Sequence
  Description of Artificial Sequence: Synthetic oligonucleotide
uguguggaguuauggugug

SEQ ID NO: 1741 - RNA, 19 nt, Artificial Sequence
  Description of Artificial Sequence: Synthetic oligonucleotide
aaccaugucaaaauuacag

SEQ ID NO: 1742 - RNA, 19 nt, Artificial Sequence
  Description of Artificial Sequence: Synthetic oligonucleotide
aaguggauggcgcuggagu

SEQ ID NO: 1743 - RNA, 19 nt, Artificial Sequence
  Description of Artificial Sequence: Synthetic oligonucleotide
accaugucaaaauuacaga

SEQ ID NO: 1744 - RNA, 19 nt, Artificial Sequence
  Description of Artificial Sequence: Synthetic oligonucleotide
agcuuaugcccuauggcug

SEQ ID NO: 1745 - RNA, 19 nt, Artificial Sequence
  Description of Artificial Sequence: Synthetic oligonucleotide
augcccuauggcugccucu

SEQ ID NO: 1746 - RNA, 19 nt, Artificial Sequence
  Description of Artificial Sequence: Synthetic oligonucleotide
cagcuuaugcccuauggcu

SEQ ID NO: 1747 - RNA, 19 nt, Artificial Sequence
  Description of Artificial Sequence: Synthetic oligonucleotide
cccuccuccugccuucagc

SEQ ID NO: 1748 - RNA, 19 nt, Artificial Sequence
  Description of Artificial Sequence: Synthetic oligonucleotide
ccuccuccugccuucagcc

SEQ ID NO: 1749 - RNA, 19 nt, Artificial Sequence
  Description of Artificial Sequence: Synthetic oligonucleotide
cuccuccugccuucagccc

SEQ ID NO: 1750 - RNA, 19 nt, Artificial Sequence
  Description of Artificial Sequence: Synthetic oligonucleotide
cugguggaugcugaggagu

SEQ ID NO: 1751 - RNA, 19 nt, Artificial Sequence
  Description of Artificial Sequence: Synthetic oligonucleotide
cuuuuuuuguuuuguuuuu

SEQ ID NO: 1752 - RNA, 19 nt, Artificial Sequence
  Description of Artificial Sequence: Synthetic oligonucleotide
gcuuaugcccuauggcugc

SEQ ID NO: 1753 - RNA, 19 nt, Artificial Sequence
  Description of Artificial Sequence: Synthetic oligonucleotide
gguacagugaggaccccac

SEQ ID NO: 1754 - RNA, 19 nt, Artificial Sequence
  Description of Artificial Sequence: Synthetic oligonucleotide
gguggaugcugaggaguau

SEQ ID NO: 1755 - RNA, 19 nt, Artificial Sequence
  Description of Artificial Sequence: Synthetic oligonucleotide
uaugcccuauggcugccuc

SEQ ID NO: 1756 - RNA, 19 nt, Artificial Sequence
  Description of Artificial Sequence: Synthetic oligonucleotide
ugcccuauggcugccucuu

SEQ ID NO: 1757 - RNA, 19 nt, Artificial Sequence
  Description of Artificial Sequence: Synthetic oligonucleotide
uuguuuuguuuuuuuaaag

SEQ ID NO: 1758 - RNA, 19 nt, Artificial Sequence
  Description of Artificial Sequence: Synthetic oligonucleotide
uuuguuuuguuuuuuuaaa

SEQ ID NO: 1759 - RNA, 19 nt, Artificial Sequence
  Description of Artificial Sequence: Synthetic oligonucleotide
uuuuguuuuguuuuuuuaa

SEQ ID NO: 1760 - RNA, 19 nt, Artificial Sequence
  Description of Artificial Sequence: Synthetic oligonucleotide
uuuuuguuuuguuuuuuua

SEQ ID NO: 1761 - RNA, 19 nt, Artificial Sequence
  Description of Artificial Sequence: Synthetic oligonucleotide
uuuuuuguuuuguuuuuuu

SEQ ID NO: 1762 - RNA, 19 nt, Artificial Sequence
  Description of Artificial Sequence: Synthetic oligonucleotide
aaagugcuuggcucgggug

SEQ ID NO: 1763 - RNA, 19 nt, Artificial Sequence
  Description of Artificial Sequence: Synthetic oligonucleotide
acauggugauggucaagug

SEQ ID NO: 1764 - RNA, 19 nt, Artificial Sequence
  Description of Artificial Sequence: Synthetic oligonucleotide
acugccagacauugaccaa

SEQ ID NO: 1765 - RNA, 19 nt, Artificial Sequence
  Description of Artificial Sequence: Synthetic oligonucleotide
augucuacauggugauggu

SEQ ID NO: 1766 - RNA, 19 nt, Artificial Sequence
  Description of Artificial Sequence: Synthetic oligonucleotide
cuacauggugauggucaag

SEQ ID NO: 1767 - RNA, 19 nt, Artificial Sequence
  Description of Artificial Sequence: Synthetic oligonucleotide
gauggucaaguguuggaug

SEQ ID NO: 1768 - RNA, 19 nt, Artificial Sequence
  Description of Artificial Sequence: Synthetic oligonucleotide
gaugucuacauggugaugg

SEQ ID NO: 1769 - RNA, 19 nt, Artificial Sequence
  Description of Artificial Sequence: Synthetic oligonucleotide
ggugugacaguuugggagu

SEQ ID NO: 1770 - RNA, 19 nt, Artificial Sequence
  Description of Artificial Sequence: Synthetic oligonucleotide
gugugacaguuugggaguu

SEQ ID NO: 1771 - RNA, 19 nt, Artificial Sequence
  Description of Artificial Sequence: Synthetic oligonucleotide
uacauggugauggucaagu

SEQ ID NO: 1772 - RNA, 19 nt, Artificial Sequence
  Description of Artificial Sequence: Synthetic oligonucleotide
ugauggucaaguguuggau

SEQ ID NO: 1773 - RNA, 19 nt, Artificial Sequence
  Description of Artificial Sequence: Synthetic oligonucleotide
ugucuacauggugaugguc

SEQ ID NO: 1774 - RNA, 19 nt, Artificial Sequence
  Description of Artificial Sequence: Synthetic oligonucleotide
ugugacaguuugggaguug

SEQ ID NO: 1775 - RNA, 19 nt, Artificial Sequence
  Description of Artificial Sequence: Synthetic oligonucleotide
acaauugaugucuacaugg

SEQ ID NO: 1776 - RNA, 19 nt, Artificial Sequence
  Description of Artificial Sequence: Synthetic oligonucleotide
agaucacagguuaccugaa

SEQ ID NO: 1777 - RNA, 19 nt, Artificial Sequence
  Description of Artificial Sequence: Synthetic oligonucleotide
aucacagguuaccugaaca

SEQ ID NO: 1778 - RNA, 19 nt, Artificial Sequence
  Description of Artificial Sequence: Synthetic oligonucleotide
auggugugacaguuuggga

SEQ ID NO: 1779 - RNA, 19 nt, Artificial Sequence
  Description of Artificial Sequence: Synthetic oligonucleotide
auugaugucuacaugguga

SEQ ID NO: 1780 - RNA, 19 nt, Artificial Sequence
  Description of Artificial Sequence: Synthetic oligonucleotide
caauugaugucuacauggu

SEQ ID NO: 1781 - RNA, 19 nt, Artificial Sequence
  Description of Artificial Sequence: Synthetic oligonucleotide
cacagguuaccugaacauc

SEQ ID NO: 1782 - RNA, 19 nt, Artificial Sequence
  Description of Artificial Sequence: Synthetic oligonucleotide
gagaucacagguuaccuga

SEQ ID NO: 1783 - RNA, 19 nt, Artificial Sequence
  Description of Artificial Sequence: Synthetic oligonucleotide
gaucacagguuaccugaac

SEQ ID NO: 1784 - RNA, 19 nt, Artificial Sequence
  Description of Artificial Sequence: Synthetic oligonucleotide
gaucugcacaauugauguc

SEQ ID NO: 1785 - RNA, 19 nt, Artificial Sequence
  Description of Artificial Sequence: Synthetic oligonucleotide
gcugccaugaugagugugc

SEQ ID NO: 1786 - RNA, 19 nt, Artificial Sequence
  Description of Artificial Sequence: Synthetic oligonucleotide
ggagaucacagguuaccug

SEQ ID NO: 1787 - RNA, 19 nt, Artificial Sequence
  Description of Artificial Sequence: Synthetic oligonucleotide
gggagaucacagguuaccu

SEQ ID NO: 1788 - RNA, 19 nt, Artificial Sequence
  Description of Artificial Sequence: Synthetic oligonucleotide
gugcgagggacccaggucu

SEQ ID NO: 1789 - RNA, 19 nt, Artificial Sequence
  Description of Artificial Sequence: Synthetic oligonucleotide
uauggugugacaguuuggg

SEQ ID NO: 1790 - RNA, 19 nt, Artificial Sequence
  Description of Artificial Sequence: Synthetic oligonucleotide
ucacagguuaccugaacau

SEQ ID NO: 1791 - RNA, 19 nt, Artificial Sequence
  Description of Artificial Sequence: Synthetic oligonucleotide
ugaagaugaggaguaugaa

SEQ ID NO: 1792 - RNA, 19 nt, Artificial Sequence
  Description of Artificial Sequence: Synthetic oligonucleotide
ugaugucuacauggugaug

SEQ ID NO: 1793 - RNA, 19 nt, Artificial Sequence
  Description of Artificial Sequence: Synthetic oligonucleotide
ugcugccaugaugagugug

SEQ ID NO: 1794 - RNA, 19 nt, Artificial Sequence
  Description of Artificial Sequence: Synthetic oligonucleotide
uggugugacaguuugggag

SEQ ID NO: 1795 - RNA, 19 nt, Artificial Sequence
  Description of Artificial Sequence: Synthetic oligonucleotide
uugaugucuacauggugau

SEQ ID NO: 1796 - RNA, 19 nt, Artificial Sequence
  Description of Artificial Sequence: Synthetic oligonucleotide
acagguuaccugaacaucc

SEQ ID NO: 1797 - RNA, 19 nt, Artificial Sequence
  Description of Artificial Sequence: Synthetic oligonucleotide
agacugcuuugccugccgg

SEQ ID NO: 1798 - RNA, 19 nt, Artificial Sequence
  Description of Artificial Sequence: Synthetic oligonucleotide
agguuaccugaacauccag

SEQ ID NO: 1799 - RNA, 19 nt, Artificial Sequence
  Description of Artificial Sequence: Synthetic oligonucleotide
auggugauggucaaguguu

SEQ ID NO: 1800 - RNA, 19 nt, Artificial Sequence
  Description of Artificial Sequence: Synthetic oligonucleotide
cagacugcuuugccugccg

SEQ ID NO: 1801 - RNA, 19 nt, Artificial Sequence
  Description of Artificial Sequence: Synthetic oligonucleotide
caggcccucaggacacaga

SEQ ID NO: 1802 - RNA, 19 nt, Artificial Sequence
  Description of Artificial Sequence: Synthetic oligonucleotide
ccauaacuuugugguggau

SEQ ID NO: 1803 - RNA, 19 nt, Artificial Sequence
  Description of Artificial Sequence: Synthetic oligonucleotide
ccccauaacuuuguggugg

SEQ ID NO: 1804 - RNA, 19 nt, Artificial Sequence
  Description of Artificial Sequence: Synthetic oligonucleotide
ccugaacauccaguccugg

SEQ ID NO: 1805 - RNA, 19 nt, Artificial Sequence
  Description of Artificial Sequence: Synthetic oligonucleotide
cucaggcccucaggacaca

SEQ ID NO: 1806 - RNA, 19 nt, Artificial Sequence
  Description of Artificial Sequence: Synthetic oligonucleotide
cugcucaggcccucaggac

SEQ ID NO: 1807 - RNA, 19 nt, Artificial Sequence
  Description of Artificial Sequence: Synthetic oligonucleotide
gagaagugacaggcuaugu

SEQ ID NO: 1808 - RNA, 19 nt, Artificial Sequence
  Description of Artificial Sequence: Synthetic oligonucleotide
gcucaggcccucaggacac

SEQ ID NO: 1809 - RNA, 19 nt, Artificial Sequence
  Description of Artificial Sequence: Synthetic oligonucleotide
gcugcucaggcccucagga

SEQ ID NO: 1810 - RNA, 19 nt, Artificial Sequence
  Description of Artificial Sequence: Synthetic oligonucleotide
ggcccucaggacacagacu

SEQ ID NO: 1811 - RNA, 19 nt, Artificial Sequence
  Description of Artificial Sequence: Synthetic oligonucleotide
ggcugcucaggcccucagg

SEQ ID NO: 1812 - RNA, 19 nt, Artificial Sequence
  Description of Artificial Sequence: Synthetic oligonucleotide
gguuaccugaacauccagu

SEQ ID NO: 1813 - RNA, 19 nt, Artificial Sequence
  Description of Artificial Sequence: Synthetic oligonucleotide
gugauggucaaguguugga

SEQ ID NO: 1814 - RNA, 19 nt, Artificial Sequence
  Description of Artificial Sequence: Synthetic oligonucleotide
ucaggcccucaggacacag

SEQ ID NO: 1815 - RNA, 19 nt, Artificial Sequence
  Description of Artificial Sequence: Synthetic oligonucleotide
ucccugaaggaaauuagug

SEQ ID NO: 1816 - RNA, 19 nt, Artificial Sequence
  Description of Artificial Sequence: Synthetic oligonucleotide
ugaacauccaguccuggcc

SEQ ID NO: 1817 - RNA, 19 nt, Artificial Sequence
  Description of Artificial Sequence: Synthetic oligonucleotide
ugacaguggagccugugua

SEQ ID NO: 1818 - RNA, 19 nt, Artificial Sequence
  Description of Artificial Sequence: Synthetic oligonucleotide
ugcacccagggguguaaag

SEQ ID NO: 1819 - RNA, 19 nt, Artificial Sequence
  Description of Artificial Sequence: Synthetic oligonucleotide
uggugauggucaaguguug

SEQ ID NO: 1820 - RNA, 19 nt, Artificial Sequence
  Description of Artificial Sequence: Synthetic oligonucleotide
uugauaacccugauuacug

SEQ ID NO: 1821 - RNA, 19 nt, Artificial Sequence
  Description of Artificial Sequence: Synthetic oligonucleotide
uuugauaacccugauuacu

SEQ ID NO: 1822 - RNA, 19 nt, Artificial Sequence
  Description of Artificial Sequence: Synthetic oligonucleotide
aacugguguguccagauag

SEQ ID NO: 1823 - RNA, 19 nt, Artificial Sequence
  Description of Artificial Sequence: Synthetic oligonucleotide
acccagacuaccugcagga

SEQ ID NO: 1824 - RNA, 19 nt, Artificial Sequence
  Description of Artificial Sequence: Synthetic oligonucleotide
acugguguguccagauagc

SEQ ID NO: 1825 - RNA, 19 nt, Artificial Sequence
  Description of Artificial Sequence: Synthetic oligonucleotide
cugcuuaacuggugugucc

SEQ ID NO: 1826 - RNA, 19 nt, Artificial Sequence
  Description of Artificial Sequence: Synthetic oligonucleotide
cuuaacugguguguccaga

SEQ ID NO: 1827 - RNA, 19 nt, Artificial Sequence
  Description of Artificial Sequence: Synthetic oligonucleotide
gcuuaacugguguguccag

SEQ ID NO: 1828 - RNA, 19 nt, Artificial Sequence
  Description of Artificial Sequence: Synthetic oligonucleotide
guuuacauggucaugguca

SEQ ID NO: 1829 - RNA, 19 nt, Artificial Sequence
  Description of Artificial Sequence: Synthetic oligonucleotide
ugcuuaacuggugugucca

SEQ ID NO: 1830 - RNA, 19 nt, Artificial Sequence
  Description of Artificial Sequence: Synthetic oligonucleotide
uuaacugguguguccagau

SEQ ID NO: 1831 - RNA, 19 nt, Artificial Sequence
  Description of Artificial Sequence: Synthetic oligonucleotide
uuuacauggucauggucaa

SEQ ID NO: 1832 - RNA, 19 nt, Artificial Sequence
  Description of Artificial Sequence: Synthetic oligonucleotide
agccucccaucugcacuau

SEQ ID NO: 1833 - RNA, 19 nt, Artificial Sequence
  Description of Artificial Sequence: Synthetic oligonucleotide
auguuggaugauugaugcu

SEQ ID NO: 1834 - RNA, 19 nt, Artificial Sequence
  Description of Artificial Sequence: Synthetic oligonucleotide
cagccucccaucugcacua

SEQ ID NO: 1835 - RNA, 19 nt, Artificial Sequence
  Description of Artificial Sequence: Synthetic oligonucleotide
cccuccuccugccuacacc

SEQ ID NO: 1836 - RNA, 19 nt, Artificial Sequence
  Description of Artificial Sequence: Synthetic oligonucleotide
ccucagccucccaucugca

SEQ ID NO: 1837 - RNA, 19 nt, Artificial Sequence
  Description of Artificial Sequence: Synthetic oligonucleotide
ccucccaucugcacuauug

SEQ ID NO: 1838 - RNA, 19 nt, Artificial Sequence
  Description of Artificial Sequence: Synthetic oligonucleotide
ccuccuccugccuacaccc

SEQ ID NO: 1839 - RNA, 19 nt, Artificial Sequence
  Description of Artificial Sequence: Synthetic oligonucleotide
cucagccucccaucugcac

SEQ ID NO: 1840 - RNA, 19 nt, Artificial Sequence
  Description of Artificial Sequence: Synthetic oligonucleotide
cucccaucugcacuauuga

SEQ ID NO: 1841 - RNA, 19 nt, Artificial Sequence
  Description of Artificial Sequence: Synthetic oligonucleotide
cuccuccugccuacacccc

SEQ ID NO: 1842 - RNA, 19 nt, Artificial Sequence
  Description of Artificial Sequence: Synthetic oligonucleotide
gccucagccucccaucugc

SEQ ID NO: 1843 - RNA, 19 nt, Artificial Sequence
  Description of Artificial Sequence: Synthetic oligonucleotide
gccucccaucugcacuauu

SEQ ID NO: 1844 - RNA, 19 nt, Artificial Sequence
  Description of Artificial Sequence: Synthetic oligonucleotide
gguacagugcugaccccac

SEQ ID NO: 1845 - RNA, 19 nt, Artificial Sequence
  Description of Artificial Sequence: Synthetic oligonucleotide
guuggaugauugaugcuga

SEQ ID NO: 1846 - RNA, 19 nt, Artificial Sequence
  Description of Artificial Sequence: Synthetic oligonucleotide
ugccucagccucccaucug

SEQ ID NO: 1847 - RNA, 19 nt, Artificial Sequence
  Description of Artificial Sequence: Synthetic oligonucleotide
uguuggaugauugaugcug

SEQ ID NO: 1848 - RNA, 19 nt, Artificial Sequence
  Description of Artificial Sequence: Synthetic oligonucleotide
uuacauggucauggucaaa

SEQ ID NO: 1849 - RNA, 19 nt, Artificial Sequence
  Description of Artificial Sequence: Synthetic oligonucleotide
aagauggaaguagaagaaa

SEQ ID NO: 1850 - RNA, 19 nt, Artificial Sequence
  Description of Artificial Sequence: Synthetic oligonucleotide
aauuucaaugacaguggag

SEQ ID NO: 1851 - RNA, 19 nt, Artificial Sequence
  Description of Artificial Sequence: Synthetic oligonucleotide
acagguuuccugaacauac

SEQ ID NO: 1852 - RNA, 19 nt, Artificial Sequence
  Description of Artificial Sequence: Synthetic oligonucleotide
accuaaggacacagacugc

SEQ ID NO: 1853 - RNA, 19 nt, Artificial Sequence
  Description of Artificial Sequence: Synthetic oligonucleotide
accucuccuuccugcgguc

SEQ ID NO: 1854 - RNA, 19 nt, Artificial Sequence
  Description of Artificial Sequence: Synthetic oligonucleotide
agacugcuuugccugcaug

SEQ ID NO: 1855 - RNA, 19 nt, Artificial Sequence
  Description of Artificial Sequence: Synthetic oligonucleotide
agauaacagguuuccugaa

SEQ ID NO: 1856 - RNA, 19 nt, Artificial Sequence
  Description of Artificial Sequence: Synthetic oligonucleotide
agauggaaguagaagaaaa

SEQ ID NO: 1857 - RNA, 19 nt, Artificial Sequence
  Description of Artificial Sequence: Synthetic oligonucleotide
aggaccuaaggacacagac

SEQ ID NO: 1858 - RNA, 19 nt, Artificial Sequence
  Description of Artificial Sequence: Synthetic oligonucleotide
aggauggcucgagacccuc

SEQ ID NO: 1859 - RNA, 19 nt, Artificial Sequence
  Description of Artificial Sequence: Synthetic oligonucleotide
agguuuccugaacauacag

SEQ ID NO: 1860 - RNA, 19 nt, Artificial Sequence
  Description of Artificial Sequence: Synthetic oligonucleotide
auaacagguuuccugaaca

SEQ ID NO: 1861 - RNA, 19 nt, Artificial Sequence
  Description of Artificial Sequence: Synthetic oligonucleotide
auggaaguagaagaaaaug

SEQ ID NO: 1862 - RNA, 19 nt, Artificial Sequence
  Description of Artificial Sequence: Synthetic oligonucleotide
auguccacauaacuuugug

SEQ ID NO: 1863 - RNA, 19 nt, Artificial Sequence
  Description of Artificial Sequence: Synthetic oligonucleotide
caagauggaaguagaagaa

SEQ ID NO: 1864 - RNA, 19 nt, Artificial Sequence
  Description of Artificial Sequence: Synthetic oligonucleotide
caaggauggcucgagaccc

SEQ ID NO: 1865 - RNA, 19 nt, Artificial Sequence
  Description of Artificial Sequence: Synthetic oligonucleotide
cagacugcuuugccugcau

SEQ ID NO: 1866 - RNA, 19 nt, Artificial Sequence
  Description of Artificial Sequence: Synthetic oligonucleotide
caggaccuaaggacacaga

SEQ ID NO: 1867 - RNA, 19 nt, Artificial Sequence
  Description of Artificial Sequence: Synthetic oligonucleotide
cagguuuccugaacauaca

SEQ ID NO: 1868 - RNA, 19 nt, Artificial Sequence
  Description of Artificial Sequence: Synthetic oligonucleotide
ccugaacauacagucaugg

SEQ ID NO: 1869 - RNA, 19 nt, Artificial Sequence
  Description of Artificial Sequence: Synthetic oligonucleotide
cucaggaccuaaggacaca

SEQ ID NO: 1870 - RNA, 19 nt, Artificial Sequence
  Description of Artificial Sequence: Synthetic oligonucleotide
cugaacauacagucauggc

SEQ ID NO: 1871 - RNA, 19 nt, Artificial Sequence
  Description of Artificial Sequence: Synthetic oligonucleotide
cugcucaggaccuaaggac

SEQ ID NO: 1872 - RNA, 19 nt, Artificial Sequence
  Description of Artificial Sequence: Synthetic oligonucleotide
gaauuucaaugacagugga

SEQ ID NO: 1873 - RNA, 19 nt, Artificial Sequence
  Description of Artificial Sequence: Synthetic oligonucleotide
gaccuaaggacacagacug

SEQ ID NO: 1874 - RNA, 19 nt, Artificial Sequence
  Description of Artificial Sequence: Synthetic oligonucleotide
gacuucaguguuuuuucua

SEQ ID NO: 1875 - RNA, 19 nt, Artificial Sequence
  Description of Artificial Sequence: Synthetic oligonucleotide
gagauaacagguuuccuga

SEQ ID NO: 1876 - RNA, 19 nt, Artificial Sequence
  Description of Artificial Sequence: Synthetic oligonucleotide
gauaacagguuuccugaac

SEQ ID NO: 1877 - RNA, 19 nt, Artificial Sequence
  Description of Artificial Sequence: Synthetic oligonucleotide
gauggaaguagaagaaaau

SEQ ID NO: 1878 - RNA, 19 nt, Artificial Sequence
  Description of Artificial Sequence: Synthetic oligonucleotide
gcucaggaccuaaggacac

SEQ ID NO: 1879 - RNA, 19 nt, Artificial Sequence
  Description of Artificial Sequence: Synthetic oligonucleotide
gcugcucaggaccuaagga

SEQ ID NO: 1880 - RNA, 19 nt, Artificial Sequence
  Description of Artificial Sequence: Synthetic oligonucleotide
ggaaguagaagaaaauggg

SEQ ID NO: 1881 - RNA, 19 nt, Artificial Sequence
  Description of Artificial Sequence: Synthetic oligonucleotide
ggaccuaaggacacagacu

SEQ ID NO: 1882 - RNA, 19 nt, Artificial Sequence
  Description of Artificial Sequence: Synthetic oligonucleotide
ggaccucuccuuccugcgg

SEQ ID NO: 1883 - RNA, 19 nt, Artificial Sequence
  Description of Artificial Sequence: Synthetic oligonucleotide
ggcugcucaggaccuaagg

SEQ ID NO: 1884 - RNA, 19 nt, Artificial Sequence
  Description of Artificial Sequence: Synthetic oligonucleotide
gguuuccugaacauacagu

SEQ ID NO: 1885 - RNA, 19 nt, Artificial Sequence
  Description of Artificial Sequence: Synthetic oligonucleotide
guucgagaagucacaggcu

SEQ ID NO: 1886 - RNA, 19 nt, Artificial Sequence
  Description of Artificial Sequence: Synthetic oligonucleotide
guuuccugaacauacaguc

SEQ ID NO: 1887 - RNA, 19 nt, Artificial Sequence
  Description of Artificial Sequence: Synthetic oligonucleotide
uaacagguuuccugaacau

SEQ ID NO: 1888 - RNA, 19 nt, Artificial Sequence
  Description of Artificial Sequence: Synthetic oligonucleotide
ucaggaccuaaggacacag

SEQ ID NO: 1889 - RNA, 19 nt, Artificial Sequence
  Description of Artificial Sequence: Synthetic oligonucleotide
ugaacauacagucauggcc

SEQ ID NO: 1890 - RNA, 19 nt, Artificial Sequence
  Description of Artificial Sequence: Synthetic oligonucleotide
ugacaguggagcauguguu

SEQ ID NO: 1891 - RNA, 19 nt, Artificial Sequence
  Description of Artificial Sequence: Synthetic oligonucleotide
ugcucaggaccuaaggaca

SEQ ID NO: 1892 - RNA, 19 nt, Artificial Sequence
  Description of Artificial Sequence: Synthetic oligonucleotide
uggaaguagaagaaaaugg

SEQ ID NO: 1893 - RNA, 19 nt, Artificial Sequence
  Description of Artificial Sequence: Synthetic oligonucleotide
uuucaaugacaguggagca

SEQ ID NO: 1894 - RNA, 19 nt, Artificial Sequence
  Description of Artificial Sequence: Synthetic oligonucleotide
gccugaauacauaaaccag

SEQ ID NO: 1895 - RNA, 19 nt, Artificial Sequence
  Description of Artificial Sequence: Synthetic oligonucleotide
uacgugauggccagcgugg

SEQ ID NO: 1896 - RNA, 19 nt, Artificial Sequence
  Description of Artificial Sequence: Synthetic oligonucleotide
ccagccccccaucugcacc

SEQ ID NO: 1897 - RNA, 19 nt, Artificial Sequence
  Description of Artificial Sequence: Synthetic oligonucleotide
cugccccagccccccaucu

SEQ ID NO: 1898 - RNA, 19 nt, Artificial Sequence
  Description of Artificial Sequence: Synthetic oligonucleotide
cacacacaccccuccccug

SEQ ID NO: 1899 - RNA, 19 nt, Artificial Sequence
  Description of Artificial Sequence: Synthetic oligonucleotide
acaaauugccaagggaaug

SEQ ID NO: 1900 - RNA, 19 nt, Artificial Sequence
  Description of Artificial Sequence: Synthetic oligonucleotide
uacaaauugccaagggaau

SEQ ID NO: 1901 - RNA, 19 nt, Artificial Sequence
  Description of Artificial Sequence: Synthetic oligonucleotide
caacuucaguguuuuuucc

SEQ ID NO: 1902 - RNA, 19 nt, Artificial Sequence
  Description of Artificial Sequence: Synthetic oligonucleotide
acuauaugggaacugauga

SEQ ID NO: 1903 - RNA, 19 nt, Artificial Sequence
  Description of Artificial Sequence: Synthetic oligonucleotide
augggaacugaugaccuuu

SEQ ID NO: 1904 - RNA, 19 nt, Artificial Sequence
  Description of Artificial Sequence: Synthetic oligonucleotide
cuauaugggaacugaugac

SEQ ID NO: 1905 - RNA, 19 nt, Artificial Sequence
  Description of Artificial Sequence: Synthetic oligonucleotide
gaacugaugaccuuuggag

SEQ ID NO: 1906 - RNA, 19 nt, Artificial Sequence
  Description of Artificial Sequence: Synthetic oligonucleotide
uaugggaacugaugaccuu

SEQ ID NO: 1907 - RNA, 19 nt, Artificial Sequence
  Description of Artificial Sequence: Synthetic oligonucleotide
aagccuacgugauggccag

SEQ ID NO: 1908 - RNA, 19 nt, Artificial Sequence
  Description of Artificial Sequence: Synthetic oligonucleotide
aaguggauggcauuggaau

SEQ ID NO: 1909 - RNA, 19 nt, Artificial Sequence
  Description of Artificial Sequence: Synthetic oligonucleotide
aauaccaugcagaaggagg

SEQ ID NO: 1910 - RNA, 19 nt, Artificial Sequence
  Description of Artificial Sequence: Synthetic oligonucleotide
acugcugccacaaccagug

SEQ ID NO: 1911 - RNA, 19 nt, Artificial Sequence
  Description of Artificial Sequence: Synthetic oligonucleotide
agaauaccaugcagaagga

SEQ ID NO: 1912 - RNA, 19 nt, Artificial Sequence
  Description of Artificial Sequence: Synthetic oligonucleotide
agcucaugcccuucggcug

SEQ ID NO: 1913 - RNA, 19 nt, Artificial Sequence
  Description of Artificial Sequence: Synthetic oligonucleotide
aggcaaagugccuaucaag

SEQ ID NO: 1914 - RNA, 19 nt, Artificial Sequence
  Description of Artificial Sequence: Synthetic oligonucleotide
aguggauggcauuggaauc

SEQ ID NO: 1915 - RNA, 19 nt, Artificial Sequence
  Description of Artificial Sequence: Synthetic oligonucleotide
auaccaugcagaaggaggc

SEQ ID NO: 1916 - RNA, 19 nt, Artificial Sequence
  Description of Artificial Sequence: Synthetic oligonucleotide
augcagaaggaggcaaagu

SEQ ID NO: 1917 - RNA, 19 nt, Artificial Sequence
  Description of Artificial Sequence: Synthetic oligonucleotide
augcccuucggcugccucc

SEQ ID NO: 1918 - RNA, 19 nt, Artificial Sequence
  Description of Artificial Sequence: Synthetic oligonucleotide
caaguggauggcauuggaa

SEQ ID NO: 1919 - RNA, 19 nt, Artificial Sequence
  Description of Artificial Sequence: Synthetic oligonucleotide
cagaaggaggcaaagugcc

SEQ ID NO: 1920 - RNA, 19 nt, Artificial Sequence
  Description of Artificial Sequence: Synthetic oligonucleotide
cagcucaugcccuucggcu

SEQ ID NO: 1921 - RNA, 19 nt, Artificial Sequence
  Description of Artificial Sequence: Synthetic oligonucleotide
caugcagaaggaggcaaag

SEQ ID NO: 1922 - RNA, 19 nt, Artificial Sequence
  Description of Artificial Sequence: Synthetic oligonucleotide
caugcccuucggcugccuc

SEQ ID NO: 1923 - RNA, 19 nt, Artificial Sequence
  Description of Artificial Sequence: Synthetic oligonucleotide
ccagugacugcugccacaa

SEQ ID NO: 1924 - RNA, 19 nt, Artificial Sequence
  Description of Artificial Sequence: Synthetic oligonucleotide
ccaugcagaaggaggcaaa

SEQ ID NO: 1925 - RNA, 19 nt, Artificial Sequence
  Description of Artificial Sequence: Synthetic oligonucleotide
cccaccagagcgggagccc

SEQ ID NO: 1926 - RNA, 19 nt, Artificial Sequence
  Description of Artificial Sequence: Synthetic oligonucleotide
cccagugacugcugccaca

SEQ ID NO: 1927 - RNA, 19 nt, Artificial Sequence
  Description of Artificial Sequence: Synthetic oligonucleotide
cucaugcccuucggcugcc

SEQ ID NO: 1928 - RNA, 19 nt, Artificial Sequence
  Description of Artificial Sequence: Synthetic oligonucleotide
cugccacaaccagugugcu

SEQ ID NO: 1929 - RNA, 19 nt, Artificial Sequence
  Description of Artificial Sequence: Synthetic oligonucleotide
cugcugccacaaccagugu

SEQ ID NO: 1930 - RNA, 19 nt, Artificial Sequence
  Description of Artificial Sequence: Synthetic oligonucleotide
cugcuggggcccggagccc

SEQ ID NO: 1931 - RNA, 19 nt, Artificial Sequence
  Description of Artificial Sequence: Synthetic oligonucleotide
cugcuggugguggcccugg

SEQ ID NO: 1932 - RNA, 19 nt, Artificial Sequence
  Description of Artificial Sequence: Synthetic oligonucleotide
gaagccuacgugauggcca

SEQ ID NO: 1933 - RNA, 19 nt, Artificial Sequence
  Description of Artificial Sequence: Synthetic oligonucleotide
gaauaccaugcagaaggag

SEQ ID NO: 1934 - RNA, 19 nt, Artificial Sequence
  Description of Artificial Sequence: Synthetic oligonucleotide
gacugcugccacaaccagu

SEQ ID NO: 1935 - RNA, 19 nt, Artificial Sequence
  Description of Artificial Sequence: Synthetic oligonucleotide
gaggcaaagugccuaucaa

SEQ ID NO: 1936 - RNA, 19 nt, Artificial Sequence
  Description of Artificial Sequence: Synthetic oligonucleotide
gcagaaggaggcaaagugc

SEQ ID NO: 1937 - RNA, 19 nt, Artificial Sequence
  Description of Artificial Sequence: Synthetic oligonucleotide
gccacaaccagugugcugc

SEQ ID NO: 1938 - RNA, 19 nt, Artificial Sequence
  Description of Artificial Sequence: Synthetic oligonucleotide
gcucaugcccuucggcugc

SEQ ID NO: 1939 - RNA, 19 nt, Artificial Sequence
  Description of Artificial Sequence: Synthetic oligonucleotide
gcugccacaaccagugugc

SEQ ID NO: 1940 - RNA, 19 nt, Artificial Sequence
  Description of Artificial Sequence: Synthetic oligonucleotide
gcuggugguggcccugggg

SEQ ID NO: 1941 - RNA, 19 nt, Artificial Sequence
  Description of Artificial Sequence: Synthetic oligonucleotide
ggaggcaaagugccuauca

SEQ ID NO: 1942 - RNA, 19 nt, Artificial Sequence
  Description of Artificial Sequence: Synthetic oligonucleotide
gguggaugccgacgaguac

SEQ ID NO: 1943 - RNA, 19 nt, Artificial Sequence
  Description of Artificial Sequence: Synthetic oligonucleotide
guggaugccgacgaguacc

SEQ ID NO: 1944 - RNA, 19 nt, Artificial Sequence
  Description of Artificial Sequence: Synthetic oligonucleotide
ucaugcccuucggcugccu

SEQ ID NO: 1945 - RNA, 19 nt, Artificial Sequence
  Description of Artificial Sequence: Synthetic oligonucleotide
ugacugcugccacaaccag

SEQ ID NO: 1946 - RNA, 19 nt, Artificial Sequence
  Description of Artificial Sequence: Synthetic oligonucleotide
ugaugaccuuuggauccaa

SEQ ID NO: 1947 - RNA, 19 nt, Artificial Sequence
  Description of Artificial Sequence: Synthetic oligonucleotide
ugcagaaggaggcaaagug

SEQ ID NO: 1948 - RNA, 19 nt, Artificial Sequence
  Description of Artificial Sequence: Synthetic oligonucleotide
ugccacaaccagugugcug

SEQ ID NO: 1949 - RNA, 19 nt, Artificial Sequence
  Description of Artificial Sequence: Synthetic oligonucleotide
ugcccuucggcugccuccu

SEQ ID NO: 1950 - RNA, 19 nt, Artificial Sequence
  Description of Artificial Sequence: Synthetic oligonucleotide
ugcugccacaaccagugug

SEQ ID NO: 1951 - RNA, 19 nt, Artificial Sequence
  Description of Artificial Sequence: Synthetic oligonucleotide
ugcuggggcccggagccca

SEQ ID NO: 1952 - RNA, 19 nt, Artificial Sequence
  Description of Artificial Sequence: Synthetic oligonucleotide
ugcuggugguggcccuggg

SEQ ID NO: 1953 - RNA, 19 nt, Artificial Sequence
  Description of Artificial Sequence: Synthetic oligonucleotide
uggaugccgacgaguaccu

SEQ ID NO: 1954 - RNA, 19 nt, Artificial Sequence
  Description of Artificial Sequence: Synthetic oligonucleotide
aaaauggcccgagaccccc

SEQ ID NO: 1955 - RNA, 19 nt, Artificial Sequence
  Description of Artificial Sequence: Synthetic oligonucleotide
aacugccagaaacugacca

SEQ ID NO: 1956 - RNA, 19 nt, Artificial Sequence
  Description of Artificial Sequence: Synthetic oligonucleotide
aagugcuggaugauagacg

SEQ ID NO: 1957 - RNA, 19 nt, Artificial Sequence
  Description of Artificial Sequence: Synthetic oligonucleotide
accaaaaucaucugugccc

SEQ ID NO: 1958 - RNA, 19 nt, Artificial Sequence
  Description of Artificial Sequence: Synthetic oligonucleotide
acugaccaaaaucaucugu

SEQ ID NO: 1959 - RNA, 19 nt, Artificial Sequence
  Description of Artificial Sequence: Synthetic oligonucleotide
caaaauggcccgagacccc

SEQ ID NO: 1960 - RNA, 19 nt, Artificial Sequence
  Description of Artificial Sequence: Synthetic oligonucleotide
caagugcuggaugauagac

SEQ ID NO: 1961 - RNA, 19 nt, Artificial Sequence
  Description of Artificial Sequence: Synthetic oligonucleotide
ccgagggcugcuggggccc

SEQ ID NO: 1962 - RNA, 19 nt, Artificial Sequence
  Description of Artificial Sequence: Synthetic oligonucleotide
cuccaaaauggcccgagac

SEQ ID NO: 1963 - RNA, 19 nt, Artificial Sequence
  Description of Artificial Sequence: Synthetic oligonucleotide
cugaccaaaaucaucugug

SEQ ID NO: 1964 - RNA, 19 nt, Artificial Sequence
  Description of Artificial Sequence: Synthetic oligonucleotide
cugccagaaacugaccaaa

SEQ ID NO: 1965 - RNA, 19 nt, Artificial Sequence
  Description of Artificial Sequence: Synthetic oligonucleotide
gaccaaaaucaucugugcc

SEQ ID NO: 1966 - RNA, 19 nt, Artificial Sequence
  Description of Artificial Sequence: Synthetic oligonucleotide
guaaaggaaaucacagguu

SEQ ID NO: 1967 - RNA, 19 nt, Artificial Sequence
  Description of Artificial Sequence: Synthetic oligonucleotide
uccaaaauggcccgagacc

SEQ ID NO: 1968 - RNA, 19 nt, Artificial Sequence
  Description of Artificial Sequence: Synthetic oligonucleotide
ucuccaaaauggcccgaga

SEQ ID NO: 1969 - RNA, 19 nt, Artificial Sequence
  Description of Artificial Sequence: Synthetic oligonucleotide
ugccagaaacugaccaaaa

SEQ ID NO: 1970 - RNA, 19 nt, Artificial Sequence
  Description of Artificial Sequence: Synthetic oligonucleotide
uggugguggcccuggggau

SEQ ID NO: 1971 - RNA, 19 nt, Artificial Sequence
  Description of Artificial Sequence: Synthetic oligonucleotide
uucuccaaaauggcccgag

SEQ ID NO: 1972 - RNA, 19 nt, Artificial Sequence
  Description of Artificial Sequence: Synthetic oligonucleotide
aaaggagaacgccucccuc

SEQ ID NO: 1973 - RNA, 19 nt, Artificial Sequence
  Description of Artificial Sequence: Synthetic oligonucleotide
aaggagaacgccucccuca

SEQ ID NO: 1974 - RNA, 19 nt, Artificial Sequence
  Description of Artificial Sequence: Synthetic oligonucleotide
acaacccugacuaccagca

SEQ ID NO: 1975 - RNA, 19 nt, Artificial Sequence
  Description of Artificial Sequence: Synthetic oligonucleotide
agaaaggagaacgccuccc

SEQ ID NO: 1976 - RNA, 19 nt, Artificial Sequence
  Description of Artificial Sequence: Synthetic oligonucleotide
aggagaacgccucccucag

SEQ ID NO: 1977 - RNA, 19 nt, Artificial Sequence
  Description of Artificial Sequence: Synthetic oligonucleotide
ccccagugacugcugccac

SEQ ID NO: 1978 - RNA, 19 nt, Artificial Sequence
  Description of Artificial Sequence: Synthetic oligonucleotide
cuggacaacccugacuacc

SEQ ID NO: 1979 - RNA, 19 nt, Artificial Sequence
  Description of Artificial Sequence: Synthetic oligonucleotide
gaaaggagaacgccucccu

SEQ ID NO: 1980 - RNA, 19 nt, Artificial Sequence
  Description of Artificial Sequence: Synthetic oligonucleotide
gacaacccugacuaccagc

SEQ ID NO: 1981 - RNA, 19 nt, Artificial Sequence
  Description of Artificial Sequence: Synthetic oligonucleotide
gagaaaggagaacgccucc

SEQ ID NO: 1982 - RNA, 19 nt, Artificial Sequence
  Description of Artificial Sequence: Synthetic oligonucleotide
gagaacgccucccucagcc

SEQ ID NO: 1983 - RNA, 19 nt, Artificial Sequence
  Description of Artificial Sequence: Synthetic oligonucleotide
ggacaacccugacuaccag

SEQ ID NO: 1984 - RNA, 19 nt, Artificial Sequence
  Description of Artificial Sequence: Synthetic oligonucleotide
ggagaacgccucccucagc

SEQ ID NO: 1985 - RNA, 19 nt, Artificial Sequence
  Description of Artificial Sequence: Synthetic oligonucleotide
uggacaacccugacuacca

SEQ ID NO: 1986 - RNA, 19 nt, Artificial Sequence
  Description of Artificial Sequence: Synthetic oligonucleotide
uggagaaaggagaacgccu

SEQ ID NO: 1987 - RNA, 19 nt, Artificial Sequence
  Description of Artificial Sequence: Synthetic oligonucleotide
uggaugaagaagacaugga

SEQ ID NO: 1988 - RNA, 19 nt, Artificial Sequence
  Description of Artificial Sequence: Synthetic oligonucleotide
acacgaugcggagacugcu

SEQ ID NO: 1989 - RNA, 19 nt, Artificial Sequence
  Description of Artificial Sequence: Synthetic oligonucleotide
acugcugcaggaaacggag

SEQ ID NO: 1990 - RNA, 19 nt, Artificial Sequence
  Description of Artificial Sequence: Synthetic oligonucleotide
agaccauguccgggaaaac

SEQ ID NO: 1991 - RNA, 19 nt, Artificial Sequence
  Description of Artificial Sequence: Synthetic oligonucleotide
agacugcugcaggaaacgg

SEQ ID NO: 1992 - RNA, 19 nt, Artificial Sequence
  Description of Artificial Sequence: Synthetic oligonucleotide
aucccccaaagccaacaaa

SEQ ID NO: 1993 - RNA, 19 nt, Artificial Sequence
  Description of Artificial Sequence: Synthetic oligonucleotide
augucaaaauuacagacuu

SEQ ID NO: 1994 - RNA, 19 nt, Artificial Sequence
  Description of Artificial Sequence: Synthetic oligonucleotide
auuacagacuucgggcugg

SEQ ID NO: 1995 - RNA, 19 nt, Artificial Sequence
  Description of Artificial Sequence: Synthetic oligonucleotide
caucaaguggauggcgcug

SEQ ID NO: 1996 - RNA, 19 nt, Artificial Sequence
  Description of Artificial Sequence: Synthetic oligonucleotide
caugucaaaauuacagacu

SEQ ID NO: 1997 - RNA, 19 nt, Artificial Sequence
  Description of Artificial Sequence: Synthetic oligonucleotide
ccaucaaguggauggcgcu

SEQ ID NO: 1998 - RNA, 19 nt, Artificial Sequence
  Description of Artificial Sequence: Synthetic oligonucleotide
cccaucaaguggauggcgc

SEQ ID NO: 1999 - RNA, 19 nt, Artificial Sequence
  Description of Artificial Sequence: Synthetic oligonucleotide
ccccaaagccaacaaagaa

SEQ ID NO: 2000 - RNA, 19 nt, Artificial Sequence
  Description of Artificial Sequence: Synthetic oligonucleotide
cccccaaagccaacaaaga

SEQ ID NO: 2001 - RNA, 19 nt, Artificial Sequence
  Description of Artificial Sequence: Synthetic oligonucleotide
ccucuuagaccauguccgg

SEQ ID NO: 2002 - RNA, 19 nt, Artificial Sequence
  Description of Artificial Sequence: Synthetic oligonucleotide
cucuuagaccauguccggg

SEQ ID NO: 2003 - RNA, 19 nt, Artificial Sequence
  Description of Artificial Sequence: Synthetic oligonucleotide
cugccucuuagaccauguc

SEQ ID NO: 2004 - RNA, 19 nt, Artificial Sequence
  Description of Artificial Sequence: Synthetic oligonucleotide
cuuagaccauguccgggaa

SEQ ID NO: 2005 - RNA, 19 nt, Artificial Sequence
  Description of Artificial Sequence: Synthetic oligonucleotide
gacugcugcaggaaacgga

SEQ ID NO: 2006 - RNA, 19 nt, Artificial Sequence
  Description of Artificial Sequence: Synthetic oligonucleotide
gagacugcugcaggaaacg

SEQ ID NO: 2007 - RNA, 19 nt, Artificial Sequence
  Description of Artificial Sequence: Synthetic oligonucleotide
gccucuuagaccauguccg

SEQ ID NO: 2008 - RNA, 19 nt, Artificial Sequence
  Description of Artificial Sequence: Synthetic oligonucleotide
gcugccucuuagaccaugu

SEQ ID NO: 2009 - RNA, 19 nt, Artificial Sequence
  Description of Artificial Sequence: Synthetic oligonucleotide
ggagacugcugcaggaaac

SEQ ID NO: 2010 - RNA, 19 nt, Artificial Sequence
  Description of Artificial Sequence: Synthetic oligonucleotide
ggcugccucuuagaccaug

SEQ ID NO: 2011 - RNA, 19 nt, Artificial Sequence
  Description of Artificial Sequence: Synthetic oligonucleotide
gggcugcaaagccucccca

SEQ ID NO: 2012 - RNA, 19 nt, Artificial Sequence
  Description of Artificial Sequence: Synthetic oligonucleotide
uagaccauguccgggaaaa

SEQ ID NO: 2013 - RNA, 19 nt, Artificial Sequence
  Description of Artificial Sequence: Synthetic oligonucleotide
ucccccaaagccaacaaag

SEQ ID NO: 2014 - RNA, 19 nt, Artificial Sequence
  Description of Artificial Sequence: Synthetic oligonucleotide
ucuuagaccauguccggga

SEQ ID NO: 2015 - RNA, 19 nt, Artificial Sequence
  Description of Artificial Sequence: Synthetic oligonucleotide
ugccucuuagaccaugucc

SEQ ID NO: 2016 - RNA, 19 nt, Artificial Sequence
  Description of Artificial Sequence: Synthetic oligonucleotide
uuacagacuucgggcuggc

SEQ ID NO: 2017 - RNA, 19 nt, Artificial Sequence
  Description of Artificial Sequence: Synthetic oligonucleotide
aaaagggggagcggcugcc

SEQ ID NO: 2018 - RNA, 19 nt, Artificial Sequence
  Description of Artificial Sequence: Synthetic oligonucleotide
cuggaaaagggggagcggc

SEQ ID NO: 2019 - RNA, 19 nt, Artificial Sequence
  Description of Artificial Sequence: Synthetic oligonucleotide
gaaaagggggagcggcugc

SEQ ID NO: 2020 - RNA, 19 nt, Artificial Sequence
  Description of Artificial Sequence: Synthetic oligonucleotide
gaagagaucacagguuacc

SEQ ID NO: 2021 - RNA, 19 nt, Artificial Sequence
  Description of Artificial Sequence: Synthetic oligonucleotide
ggaaaagggggagcggcug

SEQ ID NO: 2022 - RNA, 19 nt, Artificial Sequence
  Description of Artificial Sequence: Synthetic oligonucleotide
uggaaaagggggagcggcu

SEQ ID NO: 2023 - RNA, 19 nt, Artificial Sequence
  Description of Artificial Sequence: Synthetic oligonucleotide
aaaauuacagacuucgggc

SEQ ID NO: 2024 - RNA, 19 nt, Artificial Sequence
  Description of Artificial Sequence: Synthetic oligonucleotide
aaauuacagacuucgggcu

SEQ ID NO: 2025 - RNA, 19 nt, Artificial Sequence
  Description of Artificial Sequence: Synthetic oligonucleotide
ccccaucugcaccauugau

SEQ ID NO: 2026 - RNA, 19 nt, Artificial Sequence
  Description of Artificial Sequence: Synthetic oligonucleotide
gugaaaauuccaguggcca

SEQ ID NO: 2027 - RNA, 19 nt, Artificial Sequence
  Description of Artificial Sequence: Synthetic oligonucleotide
ugaaaauuccaguggccau

SEQ ID NO: 2028 - RNA, 19 nt, Artificial Sequence
  Description of Artificial Sequence: Synthetic oligonucleotide
ugaauaugugaaccagcca

SEQ ID NO: 2029 - RNA, 19 nt, Artificial Sequence
  Description of Artificial Sequence: Synthetic oligonucleotide
ugugaaaauuccaguggcc

SEQ ID NO: 2030 - RNA, 19 nt, Artificial Sequence
  Description of Artificial Sequence: Synthetic oligonucleotide
guccccauaacuuuguggu

SEQ ID NO: 2031 - RNA, 19 nt, Artificial Sequence
  Description of Artificial Sequence: Synthetic oligonucleotide
uccccauaacuuuguggug

SEQ ID NO: 2032 - RNA, 19 nt, Artificial Sequence
  Description of Artificial Sequence: Synthetic oligonucleotide
uguccccauaacuuugugg

SEQ ID NO: 2033 - RNA, 19 nt, Artificial Sequence
  Description of Artificial Sequence: Synthetic oligonucleotide
agacagagcuaaggaagcu

SEQ ID NO: 2034 - RNA, 19 nt, Artificial Sequence
  Description of Artificial Sequence: Synthetic oligonucleotide
aguugaugaccuucggggc

SEQ ID NO: 2035 - RNA, 19 nt, Artificial Sequence
  Description of Artificial Sequence: Synthetic oligonucleotide
auggugcauagaaaccugg

SEQ ID NO: 2036 - RNA, 19 nt, Artificial Sequence
  Description of Artificial Sequence: Synthetic oligonucleotide
auugccaagggaauguacu

SEQ ID NO: 2037 - RNA, 19 nt, Artificial Sequence
  Description of Artificial Sequence: Synthetic oligonucleotide
caaagagacagagcuaagg

SEQ ID NO: 2038 - RNA, 19 nt, Artificial Sequence
  Description of Artificial Sequence: Synthetic oligonucleotide
caaauugccaagggaaugu

SEQ ID NO: 2039 - RNA, 19 nt, Artificial Sequence
  Description of Artificial Sequence: Synthetic oligonucleotide
ccaagggaauguacuaccu

SEQ ID NO: 2040 - RNA, 19 nt, Artificial Sequence
  Description of Artificial Sequence: Synthetic oligonucleotide
gagacagagcuaaggaagc

SEQ ID NO: 2041 - RNA, 19 nt, Artificial Sequence
  Description of Artificial Sequence: Synthetic oligonucleotide
gaguugaugaccuucgggg

SEQ ID NO: 2042 - RNA, 19 nt, Artificial Sequence
  Description of Artificial Sequence: Synthetic oligonucleotide
gccaagggaauguacuacc

SEQ ID NO: 2043 - RNA, 19 nt, Artificial Sequence
  Description of Artificial Sequence: Synthetic oligonucleotide
ucaaagagacagagcuaag

SEQ ID NO: 2044 - RNA, 19 nt, Artificial Sequence
  Description of Artificial Sequence: Synthetic oligonucleotide
ugccaagggaauguacuac

SEQ ID NO: 2045 - RNA, 19 nt, Artificial Sequence
  Description of Artificial Sequence: Synthetic oligonucleotide
uggcugcccgaaacgugcu

SEQ ID NO: 2046 - RNA, 19 nt, Artificial Sequence
  Description of Artificial Sequence: Synthetic oligonucleotide
uugccaagggaauguacua

SEQ ID NO: 2047 - RNA, 19 nt, Artificial Sequence
  Description of Artificial Sequence: Synthetic oligonucleotide
acuguggacucgagcaaca

SEQ ID NO: 2048 - RNA, 19 nt, Artificial Sequence
  Description of Artificial Sequence: Synthetic oligonucleotide
caacucucaggcagugugu

SEQ ID NO: 2049 - RNA, 19 nt, Artificial Sequence
  Description of Artificial Sequence: Synthetic oligonucleotide
cagacuguggacucgagca

SEQ ID NO: 2050 - RNA, 19 nt, Artificial Sequence
  Description of Artificial Sequence: Synthetic oligonucleotide
ccacagcugcugcucaacu

SEQ ID NO: 2051 - RNA, 19 nt, Artificial Sequence
  Description of Artificial Sequence: Synthetic oligonucleotide
gacuguggacucgagcaac

SEQ ID NO: 2052 - RNA, 19 nt, Artificial Sequence
  Description of Artificial Sequence: Synthetic oligonucleotide
gcaacucucaggcagugug

SEQ ID NO: 2053 - RNA, 19 nt, Artificial Sequence
  Description of Artificial Sequence: Synthetic oligonucleotide
uggacucgagcaacauuga

SEQ ID NO: 2054 - RNA, 19 nt, Artificial Sequence
  Description of Artificial Sequence: Synthetic oligonucleotide
uguggacucgagcaacauu

SEQ ID NO: 2055 - RNA, 19 nt, Artificial Sequence
  Description of Artificial Sequence: Synthetic oligonucleotide
agugccacccaugccaucc

SEQ ID NO: 2056 - RNA, 19 nt, Artificial Sequence
  Description of Artificial Sequence: Synthetic oligonucleotide
gagugccacccaugccauc

SEQ ID NO: 2057 - RNA, 19 nt, Artificial Sequence
  Description of Artificial Sequence: Synthetic oligonucleotide
aaacagaguugguggaacc

SEQ ID NO: 2058 - RNA, 19 nt, Artificial Sequence
  Description of Artificial Sequence: Synthetic oligonucleotide
aaagaaacugagcugaaga

SEQ ID NO: 2059 - RNA, 19 nt, Artificial Sequence
  Description of Artificial Sequence: Synthetic oligonucleotide
aauucacccaucagaguga

SEQ ID NO: 2060 - RNA, 19 nt, Artificial Sequence
  Description of Artificial Sequence: Synthetic oligonucleotide
acucaacuuaugccccaug

SEQ ID NO: 2061 - RNA, 19 nt, Artificial Sequence
  Description of Artificial Sequence: Synthetic oligonucleotide
agcagaaaacaagcccucu

SEQ ID NO: 2062 - RNA, 19 nt, Artificial Sequence
  Description of Artificial Sequence: Synthetic oligonucleotide
auggaugcugaggaguacu

SEQ ID NO: 2063 - RNA, 19 nt, Artificial Sequence
  Description of Artificial Sequence: Synthetic oligonucleotide
auucacccaucagagugac

SEQ ID NO: 2064 - RNA, 19 nt, Artificial Sequence
  Description of Artificial Sequence: Synthetic oligonucleotide
cucaacuuaugccccaugg

SEQ ID NO: 2065 - RNA, 19 nt, Artificial Sequence
  Description of Artificial Sequence: Synthetic oligonucleotide
gaaacagaguugguggaac

SEQ ID NO: 2066 - RNA, 19 nt, Artificial Sequence
  Description of Artificial Sequence: Synthetic oligonucleotide
gaaagaaacugagcugaag

SEQ ID NO: 2067 - RNA, 19 nt, Artificial Sequence
  Description of Artificial Sequence: Synthetic oligonucleotide
ggaaacagaguugguggaa

SEQ ID NO: 2068 - RNA, 19 nt, Artificial Sequence
  Description of Artificial Sequence: Synthetic oligonucleotide
ucaacuuaugccccauggc

SEQ ID NO: 2069 - RNA, 19 nt, Artificial Sequence
  Description of Artificial Sequence: Synthetic oligonucleotide
ugaaagaaacugagcugaa

SEQ ID NO: 2070 - RNA, 19 nt, Artificial Sequence
  Description of Artificial Sequence: Synthetic oligonucleotide
aaguccuuggcucaggugc

SEQ ID NO: 2071 - RNA, 19 nt, Artificial Sequence
  Description of Artificial Sequence: Synthetic oligonucleotide
aaugugcuggaggcugcuc

SEQ ID NO: 2072 - RNA, 19 nt, Artificial Sequence
  Description of Artificial Sequence: Synthetic oligonucleotide
acaacccugacuacuggaa

SEQ ID NO: 2073 - RNA, 19 nt, Artificial Sequence
  Description of Artificial Sequence: Synthetic oligonucleotide
acaaccgggaccucuccuu

SEQ ID NO: 2074 - RNA, 19 nt, Artificial Sequence
  Description of Artificial Sequence: Synthetic oligonucleotide
acccagagaaacugaacgu

SEQ ID NO: 2075 - RNA, 19 nt, Artificial Sequence
  Description of Artificial Sequence: Synthetic oligonucleotide
agucccugaaggaaaucag

SEQ ID NO: 2076 - RNA, 19 nt, Artificial Sequence
  Description of Artificial Sequence: Synthetic oligonucleotide
agugaaauggccacuacuu

SEQ ID NO: 2077 - RNA, 19 nt, Artificial Sequence
  Description of Artificial Sequence: Synthetic oligonucleotide
augugcuggaggcugcuca

SEQ ID NO: 2078 - RNA, 19 nt, Artificial Sequence
  Description of Artificial Sequence: Synthetic oligonucleotide
caaacugcacccaagggug

SEQ ID NO: 2079 - RNA, 19 nt, Artificial Sequence
  Description of Artificial Sequence: Synthetic oligonucleotide
cagagaaacugaacgucuu

SEQ ID NO: 2080 - RNA, 19 nt, Artificial Sequence
  Description of Artificial Sequence: Synthetic oligonucleotide
cagucccugaaggaaauca

SEQ ID NO: 2081 - RNA, 19 nt, Artificial Sequence
  Description of Artificial Sequence: Synthetic oligonucleotide
caguguuuuuucuaaccug

SEQ ID NO: 2082 - RNA, 19 nt, Artificial Sequence
  Description of Artificial Sequence: Synthetic oligonucleotide
ccagagaaacugaacgucu

SEQ ID NO: 2083 - RNA, 19 nt, Artificial Sequence
  Description of Artificial Sequence: Synthetic oligonucleotide
ccagucccugaaggaaauc

SEQ ID NO: 2084 - RNA, 19 nt, Artificial Sequence
  Description of Artificial Sequence: Synthetic oligonucleotide
ccauagacccagagaaacu

SEQ ID NO: 2085 - RNA, 19 nt, Artificial Sequence
  Description of Artificial Sequence: Synthetic oligonucleotide
cccagagaaacugaacguc

SEQ ID NO: 2086 - RNA, 19 nt, Artificial Sequence
  Description of Artificial Sequence: Synthetic oligonucleotide
ccugaaggaaaucagcgca

SEQ ID NO: 2087 - RNA, 19 nt, Artificial Sequence
  Description of Artificial Sequence: Synthetic oligonucleotide
cguuugacaacccugacua

SEQ ID NO: 2088 - RNA, 19 nt, Artificial Sequence
  Description of Artificial Sequence: Synthetic oligonucleotide
cugaaggaaaucagcgcag

SEQ ID NO: 2089 - RNA, 19 nt, Artificial Sequence
  Description of Artificial Sequence: Synthetic oligonucleotide
cuuggcucaggugcuuuug

SEQ ID NO: 2090 - RNA, 19 nt, Artificial Sequence
  Description of Artificial Sequence: Synthetic oligonucleotide
gaaugugcuggaggcugcu

SEQ ID NO: 2091 - RNA, 19 nt, Artificial Sequence
  Description of Artificial Sequence: Synthetic oligonucleotide
gacaacccugacuacugga

SEQ ID NO: 2092 - RNA, 19 nt, Artificial Sequence
  Description of Artificial Sequence: Synthetic oligonucleotide
gacccagagaaacugaacg

SEQ ID NO: 2093 - RNA, 19 nt, Artificial Sequence
  Description of Artificial Sequence: Synthetic oligonucleotide
gccauagacccagagaaac

SEQ ID NO: 2094 - RNA, 19 nt, Artificial Sequence
  Description of Artificial Sequence: Synthetic oligonucleotide
gcguuugacaacccugacu

SEQ ID NO: 2095 - RNA, 19 nt, Artificial Sequence
  Description of Artificial Sequence: Synthetic oligonucleotide
gcucaggugcuuuuggaac

SEQ ID NO: 2096 - RNA, 19 nt, Artificial Sequence
  Description of Artificial Sequence: Synthetic oligonucleotide
ggcucaggugcuuuuggaa

SEQ ID NO: 2097 - RNA, 19 nt, Artificial Sequence
  Description of Artificial Sequence: Synthetic oligonucleotide
gucccugaaggaaaucagc

SEQ ID NO: 2098 - RNA, 19 nt, Artificial Sequence
  Description of Artificial Sequence: Synthetic oligonucleotide
gugaaauggccacuacuuu

SEQ ID NO: 2099 - RNA, 19 nt, Artificial Sequence
  Description of Artificial Sequence: Synthetic oligonucleotide
guuugacaacccugacuac

SEQ ID NO: 2100 - RNA, 19 nt, Artificial Sequence
  Description of Artificial Sequence: Synthetic oligonucleotide
uagacccagagaaacugaa

SEQ ID NO: 2101 - RNA, 19 nt, Artificial Sequence
  Description of Artificial Sequence: Synthetic oligonucleotide
ucaguguuuuuucuaaccu

SEQ ID NO: 2102 - RNA, 19 nt, Artificial Sequence
  Description of Artificial Sequence: Synthetic oligonucleotide
ugaaggaaaucagcgcagg

SEQ ID NO: 2103 - RNA, 19 nt, Artificial Sequence
  Description of Artificial Sequence: Synthetic oligonucleotide
uggcucaggugcuuuugga

SEQ ID NO: 2104 - RNA, 19 nt, Artificial Sequence
  Description of Artificial Sequence: Synthetic oligonucleotide
uucaguguuuuuucuaacc

SEQ ID NO: 2105 - RNA, 19 nt, Artificial Sequence
  Description of Artificial Sequence: Synthetic oligonucleotide
uuggcucaggugcuuuugg

SEQ ID NO: 2106 - RNA, 19 nt, Artificial Sequence
  Description of Artificial Sequence: Synthetic oligonucleotide
aaagaauaccaugcagaag

SEQ ID NO: 2107 - RNA, 19 nt, Artificial Sequence
  Description of Artificial Sequence: Synthetic oligonucleotide
aaccagugugcugcaggcu

SEQ ID NO: 2108 - RNA, 19 nt, Artificial Sequence
  Description of Artificial Sequence: Synthetic oligonucleotide
aagaauaccaugcagaagg

SEQ ID NO: 2109 - RNA, 19 nt, Artificial Sequence
  Description of Artificial Sequence: Synthetic oligonucleotide
aagagaaagaauaccaugc

SEQ ID NO: 2110 - RNA, 19 nt, Artificial Sequence
  Description of Artificial Sequence: Synthetic oligonucleotide
aagggcaugaacuacuugg

SEQ ID NO: 2111 - RNA, 19 nt, Artificial Sequence
  Description of Artificial Sequence: Synthetic oligonucleotide
aauggcccgagacccccag

SEQ ID NO: 2112 - RNA, 19 nt, Artificial Sequence
  Description of Artificial Sequence: Synthetic oligonucleotide
acagcagggcuucuucagc

SEQ ID NO: 2113 - RNA, 19 nt, Artificial Sequence
  Description of Artificial Sequence: Synthetic oligonucleotide
acauggacgacguggugga

SEQ ID NO: 2114 - RNA, 19 nt, Artificial Sequence
  Description of Artificial Sequence: Synthetic oligonucleotide
acgugguggaugccgacga

SEQ ID NO: 2115 - RNA, 19 nt, Artificial Sequence
  Description of Artificial Sequence: Synthetic oligonucleotide
agagaaagaauaccaugca

SEQ ID NO: 2116 - RNA, 19 nt, Artificial Sequence
  Description of Artificial Sequence: Synthetic oligonucleotide
agcaugucaagaucacaga

SEQ ID NO: 2117 - RNA, 19 nt, Artificial Sequence
  Description of Artificial Sequence: Synthetic oligonucleotide
agccaacaaggaaauccuc

SEQ ID NO: 2118 - RNA, 19 nt, Artificial Sequence
  Description of Artificial Sequence: Synthetic oligonucleotide
agggcaugaacuacuugga

SEQ ID NO: 2119 - RNA, 19 nt, Artificial Sequence
  Description of Artificial Sequence: Synthetic oligonucleotide
auauguaccaucgaugucu

SEQ ID NO: 2120 - RNA, 19 nt, Artificial Sequence
  Description of Artificial Sequence: Synthetic oligonucleotide
aucccacagcagggcuucu

SEQ ID NO: 2121 - RNA, 19 nt, Artificial Sequence
  Description of Artificial Sequence: Synthetic oligonucleotide
auggacgacgugguggaug

SEQ ID NO: 2122 - RNA, 19 nt, Artificial Sequence
  Description of Artificial Sequence: Synthetic oligonucleotide
auguaccaucgaugucuac

SEQ ID NO: 2123 - RNA, 19 nt, Artificial Sequence
  Description of Artificial Sequence: Synthetic oligonucleotide
caacuggugugugcagauc

SEQ ID NO: 2124 - RNA, 19 nt, Artificial Sequence
  Description of Artificial Sequence: Synthetic oligonucleotide
cagaucgcaaagggcauga

SEQ ID NO: 2125 - RNA, 19 nt, Artificial Sequence
  Description of Artificial Sequence: Synthetic oligonucleotide
cagcagggcuucuucagca

SEQ ID NO: 2126 - RNA, 19 nt, Artificial Sequence
  Description of Artificial Sequence: Synthetic oligonucleotide
cagugccacccagagugcc

SEQ ID NO: 2127 - RNA, 19 nt, Artificial Sequence
  Description of Artificial Sequence: Synthetic oligonucleotide
cauauguaccaucgauguc

SEQ ID NO: 2128 - RNA, 19 nt, Artificial Sequence
  Description of Artificial Sequence: Synthetic oligonucleotide
cauggacgacgugguggau

SEQ ID NO: 2129 - RNA, 19 nt, Artificial Sequence
  Description of Artificial Sequence: Synthetic oligonucleotide
ccaacaaggaaauccucga

SEQ ID NO: 2130 - RNA, 19 nt, Artificial Sequence
  Description of Artificial Sequence: Synthetic oligonucleotide
ccauauguaccaucgaugu

SEQ ID NO: 2131 - RNA, 19 nt, Artificial Sequence
  Description of Artificial Sequence: Synthetic oligonucleotide
cccauauguaccaucgaug

SEQ ID NO: 2132 - RNA, 19 nt, Artificial Sequence
  Description of Artificial Sequence: Synthetic oligonucleotide
cccccagugacugcugcca

SEQ ID NO: 2133 - RNA, 19 nt, Artificial Sequence
  Description of Artificial Sequence: Synthetic oligonucleotide
cccgagacccccagcgcua

SEQ ID NO: 2134 - RNA, 19 nt, Artificial Sequence
  Description of Artificial Sequence: Synthetic oligonucleotide
ccuaucaaguggauggcau

SEQ ID NO: 2135 - RNA, 19 nt, Artificial Sequence
  Description of Artificial Sequence: Synthetic oligonucleotide
ccuccuggacuauguccgg

SEQ ID NO: 2136 - RNA, 19 nt, Artificial Sequence
  Description of Artificial Sequence: Synthetic oligonucleotide
ccuggacuauguccgggaa

SEQ ID NO: 2137 - RNA, 19 nt, Artificial Sequence
  Description of Artificial Sequence: Synthetic oligonucleotide
cgacugccuggucugccgc

SEQ ID NO: 2138 - RNA, 19 nt, Artificial Sequence
  Description of Artificial Sequence: Synthetic oligonucleotide
cggaagcgcacgcugcgga

SEQ ID NO: 2139 - RNA, 19 nt, Artificial Sequence
  Description of Artificial Sequence: Synthetic oligonucleotide
cgugguggaugccgacgag

SEQ ID NO: 2140 - RNA, 19 nt, Artificial Sequence
  Description of Artificial Sequence: Synthetic oligonucleotide
cuaucaaguggauggcauu

SEQ ID NO: 2141 - RNA, 19 nt, Artificial Sequence
  Description of Artificial Sequence: Synthetic oligonucleotide
cuccuggacuauguccggg

SEQ ID NO: 2142 - RNA, 19 nt, Artificial Sequence
  Description of Artificial Sequence: Synthetic oligonucleotide
cugccuccuggacuauguc

SEQ ID NO: 2143 - RNA, 19 nt, Artificial Sequence
  Description of Artificial Sequence: Synthetic oligonucleotide
cuggugugugcagaucgca

SEQ ID NO: 2144 - RNA, 19 nt, Artificial Sequence
  Description of Artificial Sequence: Synthetic oligonucleotide
gaaagaauaccaugcagaa

SEQ ID NO: 2145 - RNA, 19 nt, Artificial Sequence
  Description of Artificial Sequence: Synthetic oligonucleotide
gaagagaaagaauaccaug

SEQ ID NO: 2146 - RNA, 19 nt, Artificial Sequence
  Description of Artificial Sequence: Synthetic oligonucleotide
gacauggacgacguggugg

SEQ ID NO: 2147 - RNA, 19 nt, Artificial Sequence
  Description of Artificial Sequence: Synthetic oligonucleotide
gacgugguggaugccgacg

SEQ ID NO: 2148 - RNA, 19 nt, Artificial Sequence
  Description of Artificial Sequence: Synthetic oligonucleotide
gcagaucgcaaagggcaug

SEQ ID NO: 2149 - RNA, 19 nt, Artificial Sequence
  Description of Artificial Sequence: Synthetic oligonucleotide
gcaggcugcacaggccccc

SEQ ID NO: 2150 - RNA, 19 nt, Artificial Sequence
  Description of Artificial Sequence: Synthetic oligonucleotide
gcaugaacuacuuggagga

SEQ ID NO: 2151 - RNA, 19 nt, Artificial Sequence
  Description of Artificial Sequence: Synthetic oligonucleotide
gccaacaaggaaauccucg

SEQ ID NO: 2152 - RNA, 19 nt, Artificial Sequence
  Description of Artificial Sequence: Synthetic oligonucleotide
gccacccagagugccugcc

SEQ ID NO: 2153 - RNA, 19 nt, Artificial Sequence
  Description of Artificial Sequence: Synthetic oligonucleotide
gccuccuggacuauguccg

SEQ ID NO: 2154 - RNA, 19 nt, Artificial Sequence
  Description of Artificial Sequence: Synthetic oligonucleotide
gcugccuccuggacuaugu

SEQ ID NO: 2155 - RNA, 19 nt, Artificial Sequence
  Description of Artificial Sequence: Synthetic oligonucleotide
ggaagcgcacgcugcggag

SEQ ID NO: 2156 - RNA, 19 nt, Artificial Sequence
  Description of Artificial Sequence: Synthetic oligonucleotide
ggcaugaacuacuuggagg

SEQ ID NO: 2157 - RNA, 19 nt, Artificial Sequence
  Description of Artificial Sequence: Synthetic oligonucleotide
ggcugccuccuggacuaug

SEQ ID NO: 2158 - RNA, 19 nt, Artificial Sequence
  Description of Artificial Sequence: Synthetic oligonucleotide
gggcaugaacuacuuggag

SEQ ID NO: 2159 - RNA, 19 nt, Artificial Sequence
  Description of Artificial Sequence: Synthetic oligonucleotide
ggugugugcagaucgcaaa

SEQ ID NO: 2160 - RNA, 19 nt, Artificial Sequence
  Description of Artificial Sequence: Synthetic oligonucleotide
gucccaccagagcgggagc

SEQ ID NO: 2161 - RNA, 19 nt, Artificial Sequence
  Description of Artificial Sequence: Synthetic oligonucleotide
gugccacccagagugccug

SEQ ID NO: 2162 - RNA, 19 nt, Artificial Sequence
  Description of Artificial Sequence: Synthetic oligonucleotide
guggagccucuuacaccca

SEQ ID NO: 2163 - RNA, 19 nt, Artificial Sequence
  Description of Artificial Sequence: Synthetic oligonucleotide
gugguggaugccgacgagu

SEQ ID NO: 2164 - RNA, 19 nt, Artificial Sequence
  Description of Artificial Sequence: Synthetic oligonucleotide
gugugcagaucgcaaaggg

SEQ ID NO: 2165 - RNA, 19 nt, Artificial Sequence
  Description of Artificial Sequence: Synthetic oligonucleotide
gugugugcagaucgcaaag

SEQ ID NO: 2166 - RNA, 19 nt, Artificial Sequence
  Description of Artificial Sequence: Synthetic oligonucleotide
uacagugccacccagagug

SEQ ID NO: 2167 - RNA, 19 nt, Artificial Sequence
  Description of Artificial Sequence: Synthetic oligonucleotide
uaucaaguggauggcauug

SEQ ID NO: 2168 - RNA, 19 nt, Artificial Sequence
  Description of Artificial Sequence: Synthetic oligonucleotide
uauguaccaucgaugucua

SEQ ID NO: 2169 - RNA, 19 nt, Artificial Sequence
  Description of Artificial Sequence: Synthetic oligonucleotide
ucccaccagagcgggagcc

SEQ ID NO: 2170 - RNA, 19 nt, Artificial Sequence
  Description of Artificial Sequence: Synthetic oligonucleotide
uccuggacuauguccggga

SEQ ID NO: 2171 - RNA, 19 nt, Artificial Sequence
  Description of Artificial Sequence: Synthetic oligonucleotide
ugaagccuacgugauggcc

SEQ ID NO: 2172 - RNA, 19 nt, Artificial Sequence
  Description of Artificial Sequence: Synthetic oligonucleotide
ugcagaucgcaaagggcau

SEQ ID NO: 2173 - RNA, 19 nt, Artificial Sequence
  Description of Artificial Sequence: Synthetic oligonucleotide
ugccacccagagugccugc

SEQ ID NO: 2174 - RNA, 19 nt, Artificial Sequence
  Description of Artificial Sequence: Synthetic oligonucleotide
ugccuccuggacuaugucc

SEQ ID NO: 2175 - RNA, 19 nt, Artificial Sequence
  Description of Artificial Sequence: Synthetic oligonucleotide
uggacgacgugguggaugc

SEQ ID NO: 2176 - RNA, 19 nt, Artificial Sequence
  Description of Artificial Sequence: Synthetic oligonucleotide
uggagccucuuacacccag

SEQ ID NO: 2177 - RNA, 19 nt, Artificial Sequence
  Description of Artificial Sequence: Synthetic oligonucleotide
uggugugugcagaucgcaa

SEQ ID NO: 2178 - RNA, 19 nt, Artificial Sequence
  Description of Artificial Sequence: Synthetic oligonucleotide
ugucccaccagagcgggag

SEQ ID NO: 2179 - RNA, 19 nt, Artificial Sequence
  Description of Artificial Sequence: Synthetic oligonucleotide
ugugugcagaucgcaaagg

SEQ ID NO: 2180 - RNA, 19 nt, Artificial Sequence
  Description of Artificial Sequence: Synthetic oligonucleotide
aagaucaaagugcugggcu

SEQ ID NO: 2181 - RNA, 19 nt, Artificial Sequence
  Description of Artificial Sequence: Synthetic oligonucleotide
aagugcugggcuccggugc

SEQ ID NO: 2182 - RNA, 19 nt, Artificial Sequence
  Description of Artificial Sequence: Synthetic oligonucleotide
acggggugaccguuuggga

SEQ ID NO: 2183 - RNA, 19 nt, Artificial Sequence
  Description of Artificial Sequence: Synthetic oligonucleotide
agaucaaagugcugggcuc

SEQ ID NO: 2184 - RNA, 19 nt, Artificial Sequence
  Description of Artificial Sequence: Synthetic oligonucleotide
agcuacggggugaccguuu

SEQ ID NO: 2185 - RNA, 19 nt, Artificial Sequence
  Description of Artificial Sequence: Synthetic oligonucleotide
aguugaugaccuuuggauc

SEQ ID NO: 2186 - RNA, 19 nt, Artificial Sequence
  Description of Artificial Sequence: Synthetic oligonucleotide
caaagugcugggcuccggu

SEQ ID NO: 2187 - RNA, 19 nt, Artificial Sequence
  Description of Artificial Sequence: Synthetic oligonucleotide
caagcucucuugaggaucu

SEQ ID NO: 2188 - RNA, 19 nt, Artificial Sequence
  Description of Artificial Sequence: Synthetic oligonucleotide
ccaagcucucuugaggauc

SEQ ID NO: 2189 - RNA, 19 nt, Artificial Sequence
  Description of Artificial Sequence: Synthetic oligonucleotide
cgcggccgcagcagccucc

SEQ ID NO: 2190 - RNA, 19 nt, Artificial Sequence
  Description of Artificial Sequence: Synthetic oligonucleotide
cggggugaccguuugggag

SEQ ID NO: 2191 - RNA, 19 nt, Artificial Sequence
  Description of Artificial Sequence: Synthetic oligonucleotide
cuacggggugaccguuugg

SEQ ID NO: 2192 - RNA, 19 nt, Artificial Sequence
  Description of Artificial Sequence: Synthetic oligonucleotide
cuggagcuacggggugacc

SEQ ID NO: 2193 - RNA, 19 nt, Artificial Sequence
  Description of Artificial Sequence: Synthetic oligonucleotide
gagcuacggggugaccguu

SEQ ID NO: 2194 - RNA, 19 nt, Artificial Sequence
  Description of Artificial Sequence: Synthetic oligonucleotide
gagggcugcuggggcccgg

SEQ ID NO: 2195 - RNA, 19 nt, Artificial Sequence
  Description of Artificial Sequence: Synthetic oligonucleotide
gaguugaugaccuuuggau

SEQ ID NO: 2196 - RNA, 19 nt, Artificial Sequence
  Description of Artificial Sequence: Synthetic oligonucleotide
gcuacggggugaccguuug

SEQ ID NO: 2197 - RNA, 19 nt, Artificial Sequence
  Description of Artificial Sequence: Synthetic oligonucleotide
gcugcacaggcccccggga

SEQ ID NO: 2198 - RNA, 19 nt, Artificial Sequence
  Description of Artificial Sequence: Synthetic oligonucleotide
ggagcuacggggugaccgu

SEQ ID NO: 2199 - RNA, 19 nt, Artificial Sequence
  Description of Artificial Sequence: Synthetic oligonucleotide
ggcccccgggagagcgacu

SEQ ID NO: 2200 - RNA, 19 nt, Artificial Sequence
  Description of Artificial Sequence: Synthetic oligonucleotide
ggcugcacaggcccccggg

SEQ ID NO: 2201 - RNA, 19 nt, Artificial Sequence
  Description of Artificial Sequence: Synthetic oligonucleotide
gggcauagaucagaagacu

SEQ ID NO: 2202 - RNA, 19 nt, Artificial Sequence
  Description of Artificial Sequence: Synthetic oligonucleotide
ggggcauagaucagaagac

SEQ ID NO: 2203 - RNA, 19 nt, Artificial Sequence
  Description of Artificial Sequence: Synthetic oligonucleotide
uacggggugaccguuuggg

SEQ ID NO: 2204 - RNA, 19 nt, Artificial Sequence
  Description of Artificial Sequence: Synthetic oligonucleotide
ucaaagugcugggcuccgg

SEQ ID NO: 2205 - RNA, 19 nt, Artificial Sequence
  Description of Artificial Sequence: Synthetic oligonucleotide
ucuggaucccagaagguga

SEQ ID NO: 2206 - RNA, 19 nt, Artificial Sequence
  Description of Artificial Sequence: Synthetic oligonucleotide
uggagcuacggggugaccg

SEQ ID NO: 2207 - RNA, 19 nt, Artificial Sequence
  Description of Artificial Sequence: Synthetic oligonucleotide
accuugucauucaggggga

SEQ ID NO: 2208 - RNA, 19 nt, Artificial Sequence
  Description of Artificial Sequence: Synthetic oligonucleotide
caaacugcaccuacggaug

SEQ ID NO: 2209 - RNA, 19 nt, Artificial Sequence
  Description of Artificial Sequence: Synthetic oligonucleotide
ccaaacugcaccuacggau

SEQ ID NO: 2210 - RNA, 19 nt, Artificial Sequence
  Description of Artificial Sequence: Synthetic oligonucleotide
ccaaacugcaccuacgggc

SEQ ID NO: 2211 - RNA, 19 nt, Artificial Sequence
  Description of Artificial Sequence: Synthetic oligonucleotide
ccuggacaacccugacuac

SEQ ID NO: 2212 - RNA, 19 nt, Artificial Sequence
  Description of Artificial Sequence: Synthetic oligonucleotide
ccuugucauucagggggau

SEQ ID NO: 2213 - RNA, 19 nt, Artificial Sequence
  Description of Artificial Sequence: Synthetic oligonucleotide
cuugucauucagggggaug

SEQ ID NO: 2214 - RNA, 19 nt, Artificial Sequence
  Description of Artificial Sequence: Synthetic oligonucleotide
gcuaccuugucauucaggg

SEQ ID NO: 2215 - RNA, 19 nt, Artificial Sequence
  Description of Artificial Sequence: Synthetic oligonucleotide
gcuuccacugcaaaacacu

SEQ ID NO: 2216 - RNA, 19 nt, Artificial Sequence
  Description of Artificial Sequence: Synthetic oligonucleotide
ggaucuugaaggaaacuga

SEQ ID NO: 2217 - RNA, 19 nt, Artificial Sequence
  Description of Artificial Sequence: Synthetic oligonucleotide
uaccuugucauucaggggg

SEQ ID NO: 2218 - RNA, 19 nt, Artificial Sequence
  Description of Artificial Sequence: Synthetic oligonucleotide
uccaaacugcaccuacgga

SEQ ID NO: 2219 - RNA, 19 nt, Artificial Sequence
  Description of Artificial Sequence: Synthetic oligonucleotide
ucccccagugacugcugcc

SEQ ID NO: 2220 - RNA, 19 nt, Artificial Sequence
  Description of Artificial Sequence: Synthetic oligonucleotide
uccuggagaaaggagaacg

SEQ ID NO: 2221 - RNA, 19 nt, Artificial Sequence
  Description of Artificial Sequence: Synthetic oligonucleotide
uugucauucagggggauga

SEQ ID NO: 2222 - RNA, 19 nt, Artificial Sequence
  Description of Artificial Sequence: Synthetic oligonucleotide
uuuugggcuggccaaacug

SEQ ID NO: 2223 - RNA, 19 nt, Artificial Sequence
  Description of Artificial Sequence: Synthetic oligonucleotide
aaaauuccaguggccauca

SEQ ID NO: 2224 - RNA, 19 nt, Artificial Sequence
  Description of Artificial Sequence: Synthetic oligonucleotide
aaacggagcugguggagcc

SEQ ID NO: 2225 - RNA, 19 nt, Artificial Sequence
  Description of Artificial Sequence: Synthetic oligonucleotide
aaauuccaguggccaucaa

SEQ ID NO: 2226 - RNA, 19 nt, Artificial Sequence
  Description of Artificial Sequence: Synthetic oligonucleotide
aaggggaugagcuaccugg

SEQ ID NO: 2227 - RNA, 19 nt, Artificial Sequence
  Description of Artificial Sequence: Synthetic oligonucleotide
acaagggcaucuggauccc

SEQ ID NO: 2228 - RNA, 19 nt, Artificial Sequence
  Description of Artificial Sequence: Synthetic oligonucleotide
acugccuggccugccucca

SEQ ID NO: 2229 - RNA, 19 nt, Artificial Sequence
  Description of Artificial Sequence: Synthetic oligonucleotide
acugugugggagcugauga

SEQ ID NO: 2230 - RNA, 19 nt, Artificial Sequence
  Description of Artificial Sequence: Synthetic oligonucleotide
agacgaagcauacgugaug

SEQ ID NO: 2231 - RNA, 19 nt, Artificial Sequence
  Description of Artificial Sequence: Synthetic oligonucleotide
agccaacaaagaaaucuua

SEQ ID NO: 2232 - RNA, 19 nt, Artificial Sequence
  Description of Artificial Sequence: Synthetic oligonucleotide
aggaaacggagcuggugga

SEQ ID NO: 2233 - RNA, 19 nt, Artificial Sequence
  Description of Artificial Sequence: Synthetic oligonucleotide
aggggaugagcuaccugga

SEQ ID NO: 2234 - RNA, 19 nt, Artificial Sequence
  Description of Artificial Sequence: Synthetic oligonucleotide
aguggauggcgcuggaguc

SEQ ID NO: 2235 - RNA, 19 nt, Artificial Sequence
  Description of Artificial Sequence: Synthetic oligonucleotide
auccaggaguuugcuggcu

SEQ ID NO: 2236 - RNA, 19 nt, Artificial Sequence
  Description of Artificial Sequence: Synthetic oligonucleotide
caaguggauggcgcuggag

SEQ ID NO: 2237 - RNA, 19 nt, Artificial Sequence
  Description of Artificial Sequence: Synthetic oligonucleotide
cacaucccccaaagccaac

SEQ ID NO: 2238 - RNA, 19 nt, Artificial Sequence
  Description of Artificial Sequence: Synthetic oligonucleotide
caggaaacggagcuggugg

SEQ ID NO: 2239 - RNA, 19 nt, Artificial Sequence
  Description of Artificial Sequence: Synthetic oligonucleotide
caggacccaccagagcggg

SEQ ID NO: 2240 - RNA, 19 nt, Artificial Sequence
  Description of Artificial Sequence: Synthetic oligonucleotide
ccaacaaagaaaucuuaga

SEQ ID NO: 2241 - RNA, 19 nt, Artificial Sequence
  Description of Artificial Sequence: Synthetic oligonucleotide
cgaagcauacgugauggcu

SEQ ID NO: 2242 - RNA, 19 nt, Artificial Sequence
  Description of Artificial Sequence: Synthetic oligonucleotide
cggaaguacacgaugcgga

SEQ ID NO: 2243 - RNA, 19 nt, Artificial Sequence
  Description of Artificial Sequence: Synthetic oligonucleotide
cugcaggaaacggagcugg

SEQ ID NO: 2244 - RNA, 19 nt, Artificial Sequence
  Description of Artificial Sequence: Synthetic oligonucleotide
cugcugggguccagggccc

SEQ ID NO: 2245 - RNA, 19 nt, Artificial Sequence
  Description of Artificial Sequence: Synthetic oligonucleotide
cugguguaugcagauugcc

SEQ ID NO: 2246 - RNA, 19 nt, Artificial Sequence
  Description of Artificial Sequence: Synthetic oligonucleotide
cugugugggagcugaugac

SEQ ID NO: 2247 - RNA, 19 nt, Artificial Sequence
  Description of Artificial Sequence: Synthetic oligonucleotide
gaaacggagcugguggagc

SEQ ID NO: 2248 - RNA, 19 nt, Artificial Sequence
  Description of Artificial Sequence: Synthetic oligonucleotide
gaacugguguaugcagauu

SEQ ID NO: 2249 - RNA, 19 nt, Artificial Sequence
  Description of Artificial Sequence: Synthetic oligonucleotide
gaccauguccgggaaaacc

SEQ ID NO: 2250 - RNA, 19 nt, Artificial Sequence
  Description of Artificial Sequence: Synthetic oligonucleotide
gaccugcugaacuggugua

SEQ ID NO: 2251 - RNA, 19 nt, Artificial Sequence
  Description of Artificial Sequence: Synthetic oligonucleotide
gacugccuggccugccucc

SEQ ID NO: 2252 - RNA, 19 nt, Artificial Sequence
  Description of Artificial Sequence: Synthetic oligonucleotide
gacugugugggagcugaug

SEQ ID NO: 2253 - RNA, 19 nt, Artificial Sequence
  Description of Artificial Sequence: Synthetic oligonucleotide
gcaggaaacggagcuggug

SEQ ID NO: 2254 - RNA, 19 nt, Artificial Sequence
  Description of Artificial Sequence: Synthetic oligonucleotide
gccaacaaagaaaucuuag

SEQ ID NO: 2255 - RNA, 19 nt, Artificial Sequence
  Description of Artificial Sequence: Synthetic oligonucleotide
gcugcaggaaacggagcug

SEQ ID NO: 2256 - RNA, 19 nt, Artificial Sequence
  Description of Artificial Sequence: Synthetic oligonucleotide
ggaaacggagcugguggag

SEQ ID NO: 2257 - RNA, 19 nt, Artificial Sequence
  Description of Artificial Sequence: Synthetic oligonucleotide
ggaaguacacgaugcggag

SEQ ID NO: 2258 - RNA, 19 nt, Artificial Sequence
  Description of Artificial Sequence: Synthetic oligonucleotide
ggagcugaugacuuuuggg

SEQ ID NO: 2259 - RNA, 19 nt, Artificial Sequence
  Description of Artificial Sequence: Synthetic oligonucleotide
ggaugagcuaccuggagga

SEQ ID NO: 2260 - RNA, 19 nt, Artificial Sequence
  Description of Artificial Sequence: Synthetic oligonucleotide
ggcacugcugggguccagg

SEQ ID NO: 2261 - RNA, 19 nt, Artificial Sequence
  Description of Artificial Sequence: Synthetic oligonucleotide
gggaugagcuaccuggagg

SEQ ID NO: 2262 - RNA, 19 nt, Artificial Sequence
  Description of Artificial Sequence: Synthetic oligonucleotide
gggcaaggugcccaucaag

SEQ ID NO: 2263 - RNA, 19 nt, Artificial Sequence
  Description of Artificial Sequence: Synthetic oligonucleotide
gggcacugcugggguccag

SEQ ID NO: 2264 - RNA, 19 nt, Artificial Sequence
  Description of Artificial Sequence: Synthetic oligonucleotide
ggggaugagcuaccuggag

SEQ ID NO: 2265 - RNA, 19 nt, Artificial Sequence
  Description of Artificial Sequence: Synthetic oligonucleotide
ggggcaaggugcccaucaa

SEQ ID NO: 2266 - RNA, 19 nt, Artificial Sequence
  Description of Artificial Sequence: Synthetic oligonucleotide
gggggcaaggugcccauca

SEQ ID NO: 2267 - RNA, 19 nt, Artificial Sequence
  Description of Artificial Sequence: Synthetic oligonucleotide
gguguaugcagauugccaa

SEQ ID NO: 2268 - RNA, 19 nt, Artificial Sequence
  Description of Artificial Sequence: Synthetic oligonucleotide
guaugcagauugccaaggg

SEQ ID NO: 2269 - RNA, 19 nt, Artificial Sequence
  Description of Artificial Sequence: Synthetic oligonucleotide
gugacugugugggagcuga

SEQ ID NO: 2270 - RNA, 19 nt, Artificial Sequence
  Description of Artificial Sequence: Synthetic oligonucleotide
gugggagcugaugacuuuu

SEQ ID NO: 2271 - RNA, 19 nt, Artificial Sequence
  Description of Artificial Sequence: Synthetic oligonucleotide
guguaugcagauugccaag

SEQ ID NO: 2272 - RNA, 19 nt, Artificial Sequence
  Description of Artificial Sequence: Synthetic oligonucleotide
gugugggagcugaugacuu

SEQ ID NO: 2273 - RNA, 19 nt, Artificial Sequence
  Description of Artificial Sequence: Synthetic oligonucleotide
guucacccaccagagugau

SEQ ID NO: 2274 - RNA, 19 nt, Artificial Sequence
  Description of Artificial Sequence: Synthetic oligonucleotide
uacaagggcaucuggaucc

SEQ ID NO: 2275 - RNA, 19 nt, Artificial Sequence
  Description of Artificial Sequence: Synthetic oligonucleotide
uagacgaagcauacgugau

SEQ ID NO: 2276 - RNA, 19 nt, Artificial Sequence
  Description of Artificial Sequence: Synthetic oligonucleotide
ugacugccuggccugccuc

SEQ ID NO: 2277 - RNA, 19 nt, Artificial Sequence
  Description of Artificial Sequence: Synthetic oligonucleotide
ugacugugugggagcugau

SEQ ID NO: 2278 - RNA, 19 nt, Artificial Sequence
  Description of Artificial Sequence: Synthetic oligonucleotide
ugcaggaaacggagcuggu

SEQ ID NO: 2279 - RNA, 19 nt, Artificial Sequence
  Description of Artificial Sequence: Synthetic oligonucleotide
ugccguggagaaccccgag

SEQ ID NO: 2280 - RNA, 19 nt, Artificial Sequence
  Description of Artificial Sequence: Synthetic oligonucleotide
ugcugggguccagggccca

SEQ ID NO: 2281 - RNA, 19 nt, Artificial Sequence
  Description of Artificial Sequence: Synthetic oligonucleotide
ugguguaugcagauugcca

SEQ ID NO: 2282 - RNA, 19 nt, Artificial Sequence
  Description of Artificial Sequence: Synthetic oligonucleotide
uguaugcagauugccaagg

SEQ ID NO: 2283 - RNA, 19 nt, Artificial Sequence
  Description of Artificial Sequence: Synthetic oligonucleotide
ugugggagcugaugacuuu

SEQ ID NO: 2284 - RNA, 19 nt, Artificial Sequence
  Description of Artificial Sequence: Synthetic oligonucleotide
aagggggagcggcugcccc

SEQ ID NO: 2285 - RNA, 19 nt, Artificial Sequence
  Description of Artificial Sequence: Synthetic oligonucleotide
aaugccagccuguccuucc

SEQ ID NO: 2286 - RNA, 19 nt, Artificial Sequence
  Description of Artificial Sequence: Synthetic oligonucleotide
acagguuaccuauacaucu

SEQ ID NO: 2287 - RNA, 19 nt, Artificial Sequence
  Description of Artificial Sequence: Synthetic oligonucleotide
agcugaugacuuuuggggc

SEQ ID NO: 2288 - RNA, 19 nt, Artificial Sequence
  Description of Artificial Sequence: Synthetic oligonucleotide
agggggagcggcugcccca

SEQ ID NO: 2289 - RNA, 19 nt, Artificial Sequence
  Description of Artificial Sequence: Synthetic oligonucleotide
agguggugcagggaaaccu

SEQ ID NO: 2290 - RNA, 19 nt, Artificial Sequence
  Description of Artificial Sequence: Synthetic oligonucleotide
auccugaaagagacggagc

SEQ ID NO: 2291 - RNA, 19 nt, Artificial Sequence
  Description of Artificial Sequence: Synthetic oligonucleotide
augccagccuguccuuccu

SEQ ID NO: 2292 - RNA, 19 nt, Artificial Sequence
  Description of Artificial Sequence: Synthetic oligonucleotide
caaugccagccuguccuuc

SEQ ID NO: 2293 - RNA, 19 nt, Artificial Sequence
  Description of Artificial Sequence: Synthetic oligonucleotide
cagcaccuucaaagggaca

SEQ ID NO: 2294 - RNA, 19 nt, Artificial Sequence
  Description of Artificial Sequence: Synthetic oligonucleotide
cagccuguccuuccugcag

SEQ ID NO: 2295 - RNA, 19 nt, Artificial Sequence
  Description of Artificial Sequence: Synthetic oligonucleotide
ccagcaccuucaaagggac

SEQ ID NO: 2296 - RNA, 19 nt, Artificial Sequence
  Description of Artificial Sequence: Synthetic oligonucleotide
ccagccuguccuuccugca

SEQ ID NO: 2297 - RNA, 19 nt, Artificial Sequence
  Description of Artificial Sequence: Synthetic oligonucleotide
ccucugacguccaucaucu

SEQ ID NO: 2298 - RNA, 19 nt, Artificial Sequence
  Description of Artificial Sequence: Synthetic oligonucleotide
ccugaccugcuggaaaagg

SEQ ID NO: 2299 - RNA, 19 nt, Artificial Sequence
  Description of Artificial Sequence: Synthetic oligonucleotide
cugaccugcuggaaaaggg

SEQ ID NO: 2300 - RNA, 19 nt, Artificial Sequence
  Description of Artificial Sequence: Synthetic oligonucleotide
gagcggcugccccagcccc

SEQ ID NO: 2301 - RNA, 19 nt, Artificial Sequence
  Description of Artificial Sequence: Synthetic oligonucleotide
gagcugaugacuuuugggg

SEQ ID NO: 2302 - RNA, 19 nt, Artificial Sequence
  Description of Artificial Sequence: Synthetic oligonucleotide
gccagccuguccuuccugc

SEQ ID NO: 2303 - RNA, 19 nt, Artificial Sequence
  Description of Artificial Sequence: Synthetic oligonucleotide
ggagcggcugccccagccc

SEQ ID NO: 2304 - RNA, 19 nt, Artificial Sequence
  Description of Artificial Sequence: Synthetic oligonucleotide
gggagcggcugccccagcc

SEQ ID NO: 2305 - RNA, 19 nt, Artificial Sequence
  Description of Artificial Sequence: Synthetic oligonucleotide
ggggagcggcugccccagc

SEQ ID NO: 2306 - RNA, 19 nt, Artificial Sequence
  Description of Artificial Sequence: Synthetic oligonucleotide
gggggagcggcugccccag

SEQ ID NO: 2307 - RNA, 19 nt, Artificial Sequence
  Description of Artificial Sequence: Synthetic oligonucleotide
ggugugacugugugggagc

SEQ ID NO: 2308 - RNA, 19 nt, Artificial Sequence
  Description of Artificial Sequence: Synthetic oligonucleotide
gugugacugugugggagcu

SEQ ID NO: 2309 - RNA, 19 nt, Artificial Sequence
  Description of Artificial Sequence: Synthetic oligonucleotide
uccugaaagagacggagcu

SEQ ID NO: 2310 - RNA, 19 nt, Artificial Sequence
  Description of Artificial Sequence: Synthetic oligonucleotide
ugaccugcuggaaaagggg

SEQ ID NO: 2311 - RNA, 19 nt, Artificial Sequence
  Description of Artificial Sequence: Synthetic oligonucleotide
ugccagccuguccuuccug

SEQ ID NO: 2312 - RNA, 19 nt, Artificial Sequence
  Description of Artificial Sequence: Synthetic oligonucleotide
uggccgcucggaacgugcu

SEQ ID NO: 2313 - RNA, 19 nt, Artificial Sequence
  Description of Artificial Sequence: Synthetic oligonucleotide
ugugacugugugggagcug

SEQ ID NO: 2314 - RNA, 19 nt, Artificial Sequence
  Description of Artificial Sequence: Synthetic oligonucleotide
aaugugaaaauuccagugg

SEQ ID NO: 2315 - RNA, 19 nt, Artificial Sequence
  Description of Artificial Sequence: Synthetic oligonucleotide
acccuccuccugccuucag

SEQ ID NO: 2316 - RNA, 19 nt, Artificial Sequence
  Description of Artificial Sequence: Synthetic oligonucleotide
accugguggaugcugagga

SEQ ID NO: 2317 - RNA, 19 nt, Artificial Sequence
  Description of Artificial Sequence: Synthetic oligonucleotide
augugaaaauuccaguggc

SEQ ID NO: 2318 - RNA, 19 nt, Artificial Sequence
  Description of Artificial Sequence: Synthetic oligonucleotide
cacccuccuccugccuuca

SEQ ID NO: 2319 - RNA, 19 nt, Artificial Sequence
  Description of Artificial Sequence: Synthetic oligonucleotide
cagagaacccagaguaccu

SEQ ID NO: 2320 - RNA, 19 nt, Artificial Sequence
  Description of Artificial Sequence: Synthetic oligonucleotide
cagauugccaaggggauga

SEQ ID NO: 2321 - RNA, 19 nt, Artificial Sequence
  Description of Artificial Sequence: Synthetic oligonucleotide
ccacccuccuccugccuuc

SEQ ID NO: 2322 - RNA, 19 nt, Artificial Sequence
  Description of Artificial Sequence: Synthetic oligonucleotide
ccaugucaaaauuacagac

SEQ ID NO: 2323 - RNA, 19 nt, Artificial Sequence
  Description of Artificial Sequence: Synthetic oligonucleotide
ccccacccuccuccugccu

SEQ ID NO: 2324 - RNA, 19 nt, Artificial Sequence
  Description of Artificial Sequence: Synthetic oligonucleotide
cccuauggcugccucuuag

SEQ ID NO: 2325 - RNA, 19 nt, Artificial Sequence
  Description of Artificial Sequence: Synthetic oligonucleotide
ccuauggcugccucuuaga

SEQ ID NO: 2326 - RNA, 19 nt, Artificial Sequence
  Description of Artificial Sequence: Synthetic oligonucleotide
ccugguggaugcugaggag

SEQ ID NO: 2327 - RNA, 19 nt, Artificial Sequence
  Description of Artificial Sequence: Synthetic oligonucleotide
cugaaagagacggagcuga

SEQ ID NO: 2328 - RNA, 19 nt, Artificial Sequence
  Description of Artificial Sequence: Synthetic oligonucleotide
cugaggaguaucugguacc

SEQ ID NO: 2329 - RNA, 19 nt, Artificial Sequence
  Description of Artificial Sequence: Synthetic oligonucleotide
cuuggaucuggcgcuuuug

SEQ ID NO: 2330 - RNA, 19 nt, Artificial Sequence
  Description of Artificial Sequence: Synthetic oligonucleotide
gaccugguggaugcugagg

SEQ ID NO: 2331 - RNA, 19 nt, Artificial Sequence
  Description of Artificial Sequence: Synthetic oligonucleotide
gcacccaagugugcaccgg

SEQ ID NO: 2332 - RNA, 19 nt, Artificial Sequence
  Description of Artificial Sequence: Synthetic oligonucleotide
gcagagaacccagaguacc

SEQ ID NO: 2333 - RNA, 19 nt, Artificial Sequence
  Description of Artificial Sequence: Synthetic oligonucleotide
gcccuauggcugccucuua

SEQ ID NO: 2334 - RNA, 19 nt, Artificial Sequence
  Description of Artificial Sequence: Synthetic oligonucleotide
gcugaggaguaucugguac

SEQ ID NO: 2335 - RNA, 19 nt, Artificial Sequence
  Description of Artificial Sequence: Synthetic oligonucleotide
ggauggcgcuggaguccau

SEQ ID NO: 2336 - RNA, 19 nt, Artificial Sequence
  Description of Artificial Sequence: Synthetic oligonucleotide
ggcagagaacccagaguac

SEQ ID NO: 2337 - RNA, 19 nt, Artificial Sequence
  Description of Artificial Sequence: Synthetic oligonucleotide
gguucacccaccagaguga

SEQ ID NO: 2338 - RNA, 19 nt, Artificial Sequence
  Description of Artificial Sequence: Synthetic oligonucleotide
guggaugcugaggaguauc

SEQ ID NO: 2339 - RNA, 19 nt, Artificial Sequence
  Description of Artificial Sequence: Synthetic oligonucleotide
ugcugaggaguaucuggua

SEQ ID NO: 2340 - RNA, 19 nt, Artificial Sequence
  Description of Artificial Sequence: Synthetic oligonucleotide
uggauggcgcuggagucca

SEQ ID NO: 2341 - RNA, 19 nt, Artificial Sequence
  Description of Artificial Sequence: Synthetic oligonucleotide
uuaaagaugaaauaaagac

SEQ ID NO: 2342 - RNA, 19 nt, Artificial Sequence
  Description of Artificial Sequence: Synthetic oligonucleotide
uuggaucuggcgcuuuugg

SEQ ID NO: 2343 - RNA, 19 nt, Artificial Sequence
  Description of Artificial Sequence: Synthetic oligonucleotide
uuggaugauugacucugaa

SEQ ID NO: 2344 - RNA, 19 nt, Artificial Sequence
  Description of Artificial Sequence: Synthetic oligonucleotide
uuuaaagaugaaauaaaga

SEQ ID NO: 2345 - RNA, 19 nt, Artificial Sequence
  Description of Artificial Sequence: Synthetic oligonucleotide
uuuuaaagaugaaauaaag

SEQ ID NO: 2346 - RNA, 19 nt, Artificial Sequence
  Description of Artificial Sequence: Synthetic oligonucleotide
accaagaccaucugugcuc

SEQ ID NO: 2347 - RNA, 19 nt, Artificial Sequence
  Description of Artificial Sequence: Synthetic oligonucleotide
accuggcugcccgaaacgu

SEQ ID NO: 2348 - RNA, 19 nt, Artificial Sequence
  Description of Artificial Sequence: Synthetic oligonucleotide
auacacacaccagagugau

SEQ ID NO: 2349 - RNA, 19 nt, Artificial Sequence
  Description of Artificial Sequence: Synthetic oligonucleotide
auggcccgagacccaccac

SEQ ID NO: 2350 - RNA, 19 nt, Artificial Sequence
  Description of Artificial Sequence: Synthetic oligonucleotide
auugaccaagaccaucugu

SEQ ID NO: 2351 - RNA, 19 nt, Artificial Sequence
  Description of Artificial Sequence: Synthetic oligonucleotide
caaguucccuugaggagcu

SEQ ID NO: 2352 - RNA, 19 nt, Artificial Sequence
  Description of Artificial Sequence: Synthetic oligonucleotide
ccaaguucccuugaggagc

SEQ ID NO: 2353 - RNA, 19 nt, Artificial Sequence
  Description of Artificial Sequence: Synthetic oligonucleotide
ccgggggcugcucaggccc

SEQ ID NO: 2354 - RNA, 19 nt, Artificial Sequence
  Description of Artificial Sequence: Synthetic oligonucleotide
cugcucaacuggggaguac

SEQ ID NO: 2355 - RNA, 19 nt, Artificial Sequence
  Description of Artificial Sequence: Synthetic oligonucleotide
gaccaagaccaucugugcu

SEQ ID NO: 2356 - RNA, 19 nt, Artificial Sequence
  Description of Artificial Sequence: Synthetic oligonucleotide
ggccuacggaagagcgacu

SEQ ID NO: 2357 - RNA, 19 nt, Artificial Sequence
  Description of Artificial Sequence: Synthetic oligonucleotide
gggggaugcuggggcccag

SEQ ID NO: 2358 - RNA, 19 nt, Artificial Sequence
  Description of Artificial Sequence: Synthetic oligonucleotide
ugcucaacuggggaguaca

SEQ ID NO: 2359 - RNA, 19 nt, Artificial Sequence
  Description of Artificial Sequence: Synthetic oligonucleotide
uggcccgagacccaccacg

SEQ ID NO: 2360 - RNA, 19 nt, Artificial Sequence
  Description of Artificial Sequence: Synthetic oligonucleotide
uugaccaagaccaucugug

SEQ ID NO: 2361 - RNA, 19 nt, Artificial Sequence
  Description of Artificial Sequence: Synthetic oligonucleotide
aaugccgaccucuccuucc

SEQ ID NO: 2362 - RNA, 19 nt, Artificial Sequence
  Description of Artificial Sequence: Synthetic oligonucleotide
accccaaccagugcugcca

SEQ ID NO: 2363 - RNA, 19 nt, Artificial Sequence
  Description of Artificial Sequence: Synthetic oligonucleotide
agaccugcuagagaagggg

SEQ ID NO: 2364 - RNA, 19 nt, Artificial Sequence
  Description of Artificial Sequence: Synthetic oligonucleotide
agagaagggggagcgguug

SEQ ID NO: 2365 - RNA, 19 nt, Artificial Sequence
  Description of Artificial Sequence: Synthetic oligonucleotide
agcuauggugugacaguuu

SEQ ID NO: 2366 - RNA, 19 nt, Artificial Sequence
  Description of Artificial Sequence: Synthetic oligonucleotide
aggaagcuuaaagugcuug

SEQ ID NO: 2367 - RNA, 19 nt, Artificial Sequence
  Description of Artificial Sequence: Synthetic oligonucleotide
aucuucaaagagacagagc

SEQ ID NO: 2368 - RNA, 19 nt, Artificial Sequence
  Description of Artificial Sequence: Synthetic oligonucleotide
augaagaugaggaguauga

SEQ ID NO: 2369 - RNA, 19 nt, Artificial Sequence
  Description of Artificial Sequence: Synthetic oligonucleotide
augccgaccucuccuuccu

SEQ ID NO: 2370 - RNA, 19 nt, Artificial Sequence
  Description of Artificial Sequence: Synthetic oligonucleotide
caaugccgaccucuccuuc

SEQ ID NO: 2371 - RNA, 19 nt, Artificial Sequence
  Description of Artificial Sequence: Synthetic oligonucleotide
cagaaucuucaaagagaca

SEQ ID NO: 2372 - RNA, 19 nt, Artificial Sequence
  Description of Artificial Sequence: Synthetic oligonucleotide
cagaccugcuagagaaggg

SEQ ID NO: 2373 - RNA, 19 nt, Artificial Sequence
  Description of Artificial Sequence: Synthetic oligonucleotide
ccagaaucuucaaagagac

SEQ ID NO: 2374 - RNA, 19 nt, Artificial Sequence
  Description of Artificial Sequence: Synthetic oligonucleotide
ccagaccugcuagagaagg

SEQ ID NO: 2375 - RNA, 19 nt, Artificial Sequence
  Description of Artificial Sequence: Synthetic oligonucleotide
ccgaccucuccuuccugca

SEQ ID NO: 2376 - RNA, 19 nt, Artificial Sequence
  Description of Artificial Sequence: Synthetic oligonucleotide
cuagagaagggggagcggu

SEQ ID NO: 2377 - RNA, 19 nt, Artificial Sequence
  Description of Artificial Sequence: Synthetic oligonucleotide
cuauggugugacaguuugg

SEQ ID NO: 2378 - RNA, 19 nt, Artificial Sequence
  Description of Artificial Sequence: Synthetic oligonucleotide
cugccaugaugagugugcc

SEQ ID NO: 2379 - RNA, 19 nt, Artificial Sequence
  Description of Artificial Sequence: Synthetic oligonucleotide
cuggagcuauggugugaca

SEQ ID NO: 2380 - RNA, 19 nt, Artificial Sequence
  Description of Artificial Sequence: Synthetic oligonucleotide
gagcuauggugugacaguu

SEQ ID NO: 2381 - RNA, 19 nt, Artificial Sequence
  Description of Artificial Sequence: Synthetic oligonucleotide
gccgaccucuccuuccugc

SEQ ID NO: 2382 - RNA, 19 nt, Artificial Sequence
  Description of Artificial Sequence: Synthetic oligonucleotide
gcuauggugugacaguuug

SEQ ID NO: 2383 - RNA, 19 nt, Artificial Sequence
  Description of Artificial Sequence: Synthetic oligonucleotide
ggaagcuuaaagugcuugg

SEQ ID NO: 2384 - RNA, 19 nt, Artificial Sequence
  Description of Artificial Sequence: Synthetic oligonucleotide
ggaggugguccugggggug

SEQ ID NO: 2385 - RNA, 19 nt, Artificial Sequence
  Description of Artificial Sequence: Synthetic oligonucleotide
uagagaagggggagcgguu

SEQ ID NO: 2386 - RNA, 19 nt, Artificial Sequence
  Description of Artificial Sequence: Synthetic oligonucleotide
ucuucaaagagacagagcu

SEQ ID NO: 2387 - RNA, 19 nt, Artificial Sequence
  Description of Artificial Sequence: Synthetic oligonucleotide
ugccaugaugagugugccg

SEQ ID NO: 2388 - RNA, 19 nt, Artificial Sequence
  Description of Artificial Sequence: Synthetic oligonucleotide
ugccgaccucuccuuccug

SEQ ID NO: 2389 - RNA, 19 nt, Artificial Sequence
  Description of Artificial Sequence: Synthetic oligonucleotide
uggaggugguccugggggu

SEQ ID NO: 2390 - RNA, 19 nt, Artificial Sequence
  Description of Artificial Sequence: Synthetic oligonucleotide
uggugcauagaaaccuggc

SEQ ID NO: 2391 - RNA, 19 nt, Artificial Sequence
  Description of Artificial Sequence: Synthetic oligonucleotide
aaaaugggcucaagaugug

SEQ ID NO: 2392 - RNA, 19 nt, Artificial Sequence
  Description of Artificial Sequence: Synthetic oligonucleotide
aagacuccaauuaagugga

SEQ ID NO: 2393 - RNA, 19 nt, Artificial Sequence
  Description of Artificial Sequence: Synthetic oligonucleotide
acuccaauuaaguggaugg

SEQ ID NO: 2394 - RNA, 19 nt, Artificial Sequence
  Description of Artificial Sequence: Synthetic oligonucleotide
acucucaggcagugugucc

SEQ ID NO: 2395 - RNA, 19 nt, Artificial Sequence
  Description of Artificial Sequence: Synthetic oligonucleotide
agacuccaauuaaguggau

SEQ ID NO: 2396 - RNA, 19 nt, Artificial Sequence
  Description of Artificial Sequence: Synthetic oligonucleotide
agcugcugcucaacugggg

SEQ ID NO: 2397 - RNA, 19 nt, Artificial Sequence
  Description of Artificial Sequence: Synthetic oligonucleotide
auaacuuugugguggauca

SEQ ID NO: 2398 - RNA, 19 nt, Artificial Sequence
  Description of Artificial Sequence: Synthetic oligonucleotide
auuaaguggauggcccuug

SEQ ID NO: 2399 - RNA, 19 nt, Artificial Sequence
  Description of Artificial Sequence: Synthetic oligonucleotide
cagcugcugcucaacuggg

SEQ ID NO: 2400 - RNA, 19 nt, Artificial Sequence
  Description of Artificial Sequence: Synthetic oligonucleotide
caggauggcccgagaccca

SEQ ID NO: 2401 - RNA, 19 nt, Artificial Sequence
  Description of Artificial Sequence: Synthetic oligonucleotide
caguguuuuuuccaauuug

SEQ ID NO: 2402 - RNA, 19 nt, Artificial Sequence
  Description of Artificial Sequence: Synthetic oligonucleotide
cgaucccugaaggaaauua

SEQ ID NO: 2403 - RNA, 19 nt, Artificial Sequence
  Description of Artificial Sequence: Synthetic oligonucleotide
cucacuuaguccuuuauca

SEQ ID NO: 2404 - RNA, 19 nt, Artificial Sequence
  Description of Artificial Sequence: Synthetic oligonucleotide
cugcugcucaacuggggag

SEQ ID NO: 2405 - RNA, 19 nt, Artificial Sequence
  Description of Artificial Sequence: Synthetic oligonucleotide
gaaauacacacaccagagu

SEQ ID NO: 2406 - RNA, 19 nt, Artificial Sequence
  Description of Artificial Sequence: Synthetic oligonucleotide
gaaguagauaaaaaugggc

SEQ ID NO: 2407 - RNA, 19 nt, Artificial Sequence
  Description of Artificial Sequence: Synthetic oligonucleotide
gacuccaauuaaguggaug

SEQ ID NO: 2408 - RNA, 19 nt, Artificial Sequence
  Description of Artificial Sequence: Synthetic oligonucleotide
gauggcccgagacccacca

SEQ ID NO: 2409 - RNA, 19 nt, Artificial Sequence
  Description of Artificial Sequence: Synthetic oligonucleotide
gauucgagaagugacaggc

SEQ ID NO: 2410 - RNA, 19 nt, Artificial Sequence
  Description of Artificial Sequence: Synthetic oligonucleotide
gccagacauugaccaagac

SEQ ID NO: 2411 - RNA, 19 nt, Artificial Sequence
  Description of Artificial Sequence: Synthetic oligonucleotide
ggaaauacacacaccagag

SEQ ID NO: 2412 - RNA, 19 nt, Artificial Sequence
  Description of Artificial Sequence: Synthetic oligonucleotide
ggauggcccgagacccacc

SEQ ID NO: 2413 - RNA, 19 nt, Artificial Sequence
  Description of Artificial Sequence: Synthetic oligonucleotide
ggauggcccuugagaguau

SEQ ID NO: 2414 - RNA, 19 nt, Artificial Sequence
  Description of Artificial Sequence: Synthetic oligonucleotide
guuggaugauugaugagaa

SEQ ID NO: 2415 - RNA, 19 nt, Artificial Sequence
  Description of Artificial Sequence: Synthetic oligonucleotide
uaaguggauggcccuugag

SEQ ID NO: 2416 - RNA, 19 nt, Artificial Sequence
  Description of Artificial Sequence: Synthetic oligonucleotide
uccaauuaaguggauggcc

SEQ ID NO: 2417 - RNA, 19 nt, Artificial Sequence
  Description of Artificial Sequence: Synthetic oligonucleotide
ugccgggggcugcucaggc

SEQ ID NO: 2418 - RNA, 19 nt, Artificial Sequence
  Description of Artificial Sequence: Synthetic oligonucleotide
ugcugcucaacuggggagu

SEQ ID NO: 2419 - RNA, 19 nt, Artificial Sequence
  Description of Artificial Sequence: Synthetic oligonucleotide
uggauggcccuugagagua

SEQ ID NO: 2420 - RNA, 19 nt, Artificial Sequence
  Description of Artificial Sequence: Synthetic oligonucleotide
uguuggaugauugaugaga

SEQ ID NO: 2421 - RNA, 19 nt, Artificial Sequence
  Description of Artificial Sequence: Synthetic oligonucleotide
uucaguguuuuuuccaauu

SEQ ID NO: 2422 - RNA, 19 nt, Artificial Sequence
  Description of Artificial Sequence: Synthetic oligonucleotide
uuggcucgggugucuuugg

SEQ ID NO: 2423 - RNA, 19 nt, Artificial Sequence
  Description of Artificial Sequence: Synthetic oligonucleotide
acccaucagagugacguuu

SEQ ID NO: 2424 - RNA, 19 nt, Artificial Sequence
  Description of Artificial Sequence: Synthetic oligonucleotide
acguuuacauggucauggu

SEQ ID NO: 2425 - RNA, 19 nt, Artificial Sequence
  Description of Artificial Sequence: Synthetic oligonucleotide
aucagagugacguuuggag

SEQ ID NO: 2426 - RNA, 19 nt, Artificial Sequence
  Description of Artificial Sequence: Synthetic oligonucleotide
caucagagugacguuugga

SEQ ID NO: 2427 - RNA, 19 nt, Artificial Sequence
  Description of Artificial Sequence: Synthetic oligonucleotide
ccaucagagugacguuugg

SEQ ID NO: 2428 - RNA, 19 nt, Artificial Sequence
  Description of Artificial Sequence: Synthetic oligonucleotide
ccaugugaaaaucacagau

SEQ ID NO: 2429 - RNA, 19 nt, Artificial Sequence
  Description of Artificial Sequence: Synthetic oligonucleotide
cccaucagagugacguuug

SEQ ID NO: 2430 - RNA, 19 nt, Artificial Sequence
  Description of Artificial Sequence: Synthetic oligonucleotide
cguuuacauggucaugguc

SEQ ID NO: 2431 - RNA, 19 nt, Artificial Sequence
  Description of Artificial Sequence: Synthetic oligonucleotide
gaauaauccaaaaugaccc

SEQ ID NO: 2432 - RNA, 19 nt, Artificial Sequence
  Description of Artificial Sequence: Synthetic oligonucleotide
gacguuuacauggucaugg

SEQ ID NO: 2433 - RNA, 19 nt, Artificial Sequence
  Description of Artificial Sequence: Synthetic oligonucleotide
guauuuugaaagaaacuga

SEQ ID NO: 2434 - RNA, 19 nt, Artificial Sequence
  Description of Artificial Sequence: Synthetic oligonucleotide
uagagaaaggagaacguuu

SEQ ID NO: 2435 - RNA, 19 nt, Artificial Sequence
  Description of Artificial Sequence: Synthetic oligonucleotide
uauuagagaaaggagaacg

SEQ ID NO: 2436 - RNA, 19 nt, Artificial Sequence
  Description of Artificial Sequence: Synthetic oligonucleotide
ucagagugacguuuggagc

SEQ ID NO: 2437 - RNA, 19 nt, Artificial Sequence
  Description of Artificial Sequence: Synthetic oligonucleotide
ugccaauuaaauggauggc

SEQ ID NO: 2438 - RNA, 19 nt, Artificial Sequence
  Description of Artificial Sequence: Synthetic oligonucleotide
uuuugggcuagccagacuc

SEQ ID NO: 2439 - RNA, 19 nt, Artificial Sequence
  Description of Artificial Sequence: Synthetic oligonucleotide
aaaccaugugaaaaucaca

SEQ ID NO: 2440 - RNA, 19 nt, Artificial Sequence
  Description of Artificial Sequence: Synthetic oligonucleotide
aagggaaugauguaccugg

SEQ ID NO: 2441 - RNA, 19 nt, Artificial Sequence
  Description of Artificial Sequence: Synthetic oligonucleotide
aauggauggcucuggagug

SEQ ID NO: 2442 - RNA, 19 nt, Artificial Sequence
  Description of Artificial Sequence: Synthetic oligonucleotide
acuuuuuuucuuuuucuuu

SEQ ID NO: 2443 - RNA, 19 nt, Artificial Sequence
  Description of Artificial Sequence: Synthetic oligonucleotide
agaguacaaugcugaugga

SEQ ID NO: 2444 - RNA, 19 nt, Artificial Sequence
  Description of Artificial Sequence: Synthetic oligonucleotide
agcugguuacucaacuuau

SEQ ID NO: 2445 - RNA, 19 nt, Artificial Sequence
  Description of Artificial Sequence: Synthetic oligonucleotide
aggagagcuggaugaggaa

SEQ ID NO: 2446 - RNA, 19 nt, Artificial Sequence
  Description of Artificial Sequence: Synthetic oligonucleotide
agggaaugauguaccugga

SEQ ID NO: 2447 - RNA, 19 nt, Artificial Sequence
  Description of Artificial Sequence: Synthetic oligonucleotide
aguacaaugcugauggagg

SEQ ID NO: 2448 - RNA, 19 nt, Artificial Sequence
  Description of Artificial Sequence: Synthetic oligonucleotide
auaugauggaugcugagga

SEQ ID NO: 2449 - RNA, 19 nt, Artificial Sequence
  Description of Artificial Sequence: Synthetic oligonucleotide
aucugcacuauugacguuu

SEQ ID NO: 2450 - RNA, 19 nt, Artificial Sequence
  Description of Artificial Sequence: Synthetic oligonucleotide
auuaaauggauggcucugg

SEQ ID NO: 2451 - RNA, 19 nt, Artificial Sequence
  Description of Artificial Sequence: Synthetic oligonucleotide
auugacguuuacaugguca

SEQ ID NO: 2452 - RNA, 19 nt, Artificial Sequence
  Description of Artificial Sequence: Synthetic oligonucleotide
caaaccaugugaaaaucac

SEQ ID NO: 2453 - RNA, 19 nt, Artificial Sequence
  Description of Artificial Sequence: Synthetic oligonucleotide
cacccaucagagugacguu

SEQ ID NO: 2454 - RNA, 19 nt, Artificial Sequence
  Description of Artificial Sequence: Synthetic oligonucleotide
cacuauugacguuuacaug

SEQ ID NO: 2455 - RNA, 19 nt, Artificial Sequence
  Description of Artificial Sequence: Synthetic oligonucleotide
cagagaauccugaauaccu

SEQ ID NO: 2456 - RNA, 19 nt, Artificial Sequence
  Description of Artificial Sequence: Synthetic oligonucleotide
cagauagcuaagggaauga

SEQ ID NO: 2457 - RNA, 19 nt, Artificial Sequence
  Description of Artificial Sequence: Synthetic oligonucleotide
cagcugguuacucaacuua

SEQ ID NO: 2458 - RNA, 19 nt, Artificial Sequence
  Description of Artificial Sequence: Synthetic oligonucleotide
caucugcacuauugacguu

SEQ ID NO: 2459 - RNA, 19 nt, Artificial Sequence
  Description of Artificial Sequence: Synthetic oligonucleotide
ccaaaccaugugaaaauca

SEQ ID NO: 2460 - RNA, 19 nt, Artificial Sequence
  Description of Artificial Sequence: Synthetic oligonucleotide
cccauggcugccuguugga

SEQ ID NO: 2461 - RNA, 19 nt, Artificial Sequence
  Description of Artificial Sequence: Synthetic oligonucleotide
ccccauggcugccuguugg

SEQ ID NO: 2462 - RNA, 19 nt, Artificial Sequence
  Description of Artificial Sequence: Synthetic oligonucleotide
cugaggaguacuugguccc

SEQ ID NO: 2463 - RNA, 19 nt, Artificial Sequence
  Description of Artificial Sequence: Synthetic oligonucleotide
cugcacuauugacguuuac

SEQ ID NO: 2464 - RNA, 19 nt, Artificial Sequence
  Description of Artificial Sequence: Synthetic oligonucleotide
cugguuacucaacuuaugc

SEQ ID NO: 2465 - RNA, 19 nt, Artificial Sequence
  Description of Artificial Sequence: Synthetic oligonucleotide
cuucaagaugaaguaaaga

SEQ ID NO: 2466 - RNA, 19 nt, Artificial Sequence
  Description of Artificial Sequence: Synthetic oligonucleotide
cuuuuuuucuuuuucuuuu

SEQ ID NO: 2467 - RNA, 19 nt, Artificial Sequence
  Description of Artificial Sequence: Synthetic oligonucleotide
gaacugaugugugcauauu

SEQ ID NO: 2468 - RNA, 19 nt, Artificial Sequence
  Description of Artificial Sequence: Synthetic oligonucleotide
gaggagagcuggaugagga

SEQ ID NO: 2469 - RNA, 19 nt, Artificial Sequence
  Description of Artificial Sequence: Synthetic oligonucleotide
gaguacaaugcugauggag

SEQ ID NO: 2470 - RNA, 19 nt, Artificial Sequence
  Description of Artificial Sequence: Synthetic oligonucleotide
gauaugauggaugcugagg

SEQ ID NO: 2471 - RNA, 19 nt, Artificial Sequence
  Description of Artificial Sequence: Synthetic oligonucleotide
gcacuauugacguuuacau

SEQ ID NO: 2472 - RNA, 19 nt, Artificial Sequence
  Description of Artificial Sequence: Synthetic oligonucleotide
gcagagaauccugaauacc

SEQ ID NO: 2473 - RNA, 19 nt, Artificial Sequence
  Description of Artificial Sequence: Synthetic oligonucleotide
gccccauggcugccuguug

SEQ ID NO: 2474 - RNA, 19 nt, Artificial Sequence
  Description of Artificial Sequence: Synthetic oligonucleotide
gcugaggaguacuuggucc

SEQ ID NO: 2475 - RNA, 19 nt, Artificial Sequence
  Description of Artificial Sequence: Synthetic oligonucleotide
gcugguuacucaacuuaug

SEQ ID NO: 2476 - RNA, 19 nt, Artificial Sequence
  Description of Artificial Sequence: Synthetic oligonucleotide
ggagagcuggaugaggaag

SEQ ID NO: 2477 - RNA, 19 nt, Artificial Sequence
  Description of Artificial Sequence: Synthetic oligonucleotide
ggcagagaauccugaauac

SEQ ID NO: 2478 - RNA, 19 nt, Artificial Sequence
  Description of Artificial Sequence: Synthetic oligonucleotide
gguuacucaacuuaugccc

SEQ ID NO: 2479 - RNA, 19 nt, Artificial Sequence
  Description of Artificial Sequence: Synthetic oligonucleotide
guuuuuuguuuuauuuuug

SEQ ID NO: 2480 - RNA, 19 nt, Artificial Sequence
  Description of Artificial Sequence: Synthetic oligonucleotide
uaaauggauggcucuggag

SEQ ID NO: 2481 - RNA, 19 nt, Artificial Sequence
  Description of Artificial Sequence: Synthetic oligonucleotide
uaugauggaugcugaggag

SEQ ID NO: 2482 - RNA, 19 nt, Artificial Sequence
  Description of Artificial Sequence: Synthetic oligonucleotide
uccaaaccaugugaaaauc

SEQ ID NO: 2483 - RNA, 19 nt, Artificial Sequence
  Description of Artificial Sequence: Synthetic oligonucleotide
ucccaucugcacuauugac

SEQ ID NO: 2484 - RNA, 19 nt, Artificial Sequence
  Description of Artificial Sequence: Synthetic oligonucleotide
ucugcacuauugacguuua

SEQ ID NO: 2485 - RNA, 19 nt, Artificial Sequence
  Description of Artificial Sequence: Synthetic oligonucleotide
ucuucaagaugaaguaaag

SEQ ID NO: 2486 - RNA, 19 nt, Artificial Sequence
  Description of Artificial Sequence: Synthetic oligonucleotide
ugacguuuacauggucaug

SEQ ID NO: 2487 - RNA, 19 nt, Artificial Sequence
  Description of Artificial Sequence: Synthetic oligonucleotide
ugcacuauugacguuuaca

SEQ ID NO: 2488 - RNA, 19 nt, Artificial Sequence
  Description of Artificial Sequence: Synthetic oligonucleotide
ugcugaggaguacuugguc

SEQ ID NO: 2489 - RNA, 19 nt, Artificial Sequence
  Description of Artificial Sequence: Synthetic oligonucleotide
uggaaacagaguuggugga

SEQ ID NO: 2490 - RNA, 19 nt, Artificial Sequence
  Description of Artificial Sequence: Synthetic oligonucleotide
ugguuacucaacuuaugcc

SEQ ID NO: 2491 - RNA, 19 nt, Artificial Sequence
  Description of Artificial Sequence: Synthetic oligonucleotide
uguuuuuuguuuuauuuuu

SEQ ID NO: 2492 - RNA, 19 nt, Artificial Sequence
  Description of Artificial Sequence: Synthetic oligonucleotide
uuaaauggauggcucugga

SEQ ID NO: 2493 - RNA, 19 nt, Artificial Sequence
  Description of Artificial Sequence: Synthetic oligonucleotide
uugaaagaaacugagcuga

SEQ ID NO: 2494 - RNA, 19 nt, Artificial Sequence
  Description of Artificial Sequence: Synthetic oligonucleotide
uugacguuuacauggucau

SEQ ID NO: 2495 - RNA, 19 nt, Artificial Sequence
  Description of Artificial Sequence: Synthetic oligonucleotide
uuuuuguuuuauuuuuguc

SEQ ID NO: 2496 - RNA, 19 nt, Artificial Sequence
  Description of Artificial Sequence: Synthetic oligonucleotide
uuuuuuucuuuuucuuuuu

SEQ ID NO: 2497 - RNA, 19 nt, Artificial Sequence
  Description of Artificial Sequence: Synthetic oligonucleotide
aaaaguccuuggcucaggu

SEQ ID NO: 2498 - RNA, 19 nt, Artificial Sequence
  Description of Artificial Sequence: Synthetic oligonucleotide
aaaaugggauuaaaaugug

SEQ ID NO: 2499 - RNA, 19 nt, Artificial Sequence
  Description of Artificial Sequence: Synthetic oligonucleotide
aaaugggauuaaaaugugu

SEQ ID NO: 2500 - RNA, 19 nt, Artificial Sequence
  Description of Artificial Sequence: Synthetic oligonucleotide
aaauguccacauaacuuug

SEQ ID NO: 2501 - RNA, 19 nt, Artificial Sequence
  Description of Artificial Sequence: Synthetic oligonucleotide
aacauacagucauggccac

SEQ ID NO: 2502 - RNA, 19 nt, Artificial Sequence
  Description of Artificial Sequence: Synthetic oligonucleotide
aacugcugcuuaacuggug

SEQ ID NO: 2503 - RNA, 19 nt, Artificial Sequence
  Description of Artificial Sequence: Synthetic oligonucleotide
aagaugccaauuaaaugga

SEQ ID NO: 2504 - RNA, 19 nt, Artificial Sequence
  Description of Artificial Sequence: Synthetic oligonucleotide
aauguccacauaacuuugu

SEQ ID NO: 2505 - RNA, 19 nt, Artificial Sequence
  Description of Artificial Sequence: Synthetic oligonucleotide
aauuaaauggauggcucug

SEQ ID NO: 2506 - RNA, 19 nt, Artificial Sequence
  Description of Artificial Sequence: Synthetic oligonucleotide
acauacagucauggccacc

SEQ ID NO: 2507 - RNA, 19 nt, Artificial Sequence
  Description of Artificial Sequence: Synthetic oligonucleotide
acccaaggguguaacgguc

SEQ ID NO: 2508 - RNA, 19 nt, Artificial Sequence
  Description of Artificial Sequence: Synthetic oligonucleotide
acguuuggagcuauggagu

SEQ ID NO: 2509 - RNA, 19 nt, Artificial Sequence
  Description of Artificial Sequence: Synthetic oligonucleotide
acuauugacguuuacaugg

SEQ ID NO: 2510 - RNA, 19 nt, Artificial Sequence
  Description of Artificial Sequence: Synthetic oligonucleotide
agaagucacaggcuacgug

SEQ ID NO: 2511 - RNA, 19 nt, Artificial Sequence
  Description of Artificial Sequence: Synthetic oligonucleotide
agagauaacagguuuccug

SEQ ID NO: 2512 - RNA, 19 nt, Artificial Sequence
  Description of Artificial Sequence: Synthetic oligonucleotide
agaugccaauuaaauggau

SEQ ID NO: 2513 - RNA, 19 nt, Artificial Sequence
  Description of Artificial Sequence: Synthetic oligonucleotide
aggcugcucaggaccuaag

SEQ ID NO: 2514 - RNA, 19 nt, Artificial Sequence
  Description of Artificial Sequence: Synthetic oligonucleotide
auaacuuugugguagauuc

SEQ ID NO: 2515 - RNA, 19 nt, Artificial Sequence
  Description of Artificial Sequence: Synthetic oligonucleotide
augccaauuaaauggaugg

SEQ ID NO: 2516 - RNA, 19 nt, Artificial Sequence
  Description of Artificial Sequence: Synthetic oligonucleotide
caacugcugcuuaacuggu

SEQ ID NO: 2517 - RNA, 19 nt, Artificial Sequence
  Description of Artificial Sequence: Synthetic oligonucleotide
cacccaaggguguaacggu

SEQ ID NO: 2518 - RNA, 19 nt, Artificial Sequence
  Description of Artificial Sequence: Synthetic oligonucleotide
cccaaggguguaacggucc

SEQ ID NO: 2519 - RNA, 19 nt, Artificial Sequence
  Description of Artificial Sequence: Synthetic oligonucleotide
cuauugacguuuacauggu

SEQ ID NO: 2520 - RNA, 19 nt, Artificial Sequence
  Description of Artificial Sequence: Synthetic oligonucleotide
cugaacgucuuucggacag

SEQ ID NO: 2521 - RNA, 19 nt, Artificial Sequence
  Description of Artificial Sequence: Synthetic oligonucleotide
cuggaggcugcucaggacc

SEQ ID NO: 2522 - RNA, 19 nt, Artificial Sequence
  Description of Artificial Sequence: Synthetic oligonucleotide
cugugucuacuaaaagcac

SEQ ID NO: 2523 - RNA, 19 nt, Artificial Sequence
  Description of Artificial Sequence: Synthetic oligonucleotide
gaacauacagucauggcca

SEQ ID NO: 2524 - RNA, 19 nt, Artificial Sequence
  Description of Artificial Sequence: Synthetic oligonucleotide
gacguuuggagcuauggag

SEQ ID NO: 2525 - RNA, 19 nt, Artificial Sequence
  Description of Artificial Sequence: Synthetic oligonucleotide
gagagauaacagguuuccu

SEQ ID NO: 2526 - RNA, 19 nt, Artificial Sequence
  Description of Artificial Sequence: Synthetic oligonucleotide
gaggcugcucaggaccuaa

SEQ ID NO: 2527 - RNA, 19 nt, Artificial Sequence
  Description of Artificial Sequence: Synthetic oligonucleotide
gaugccaauuaaauggaug

SEQ ID NO: 2528 - RNA, 19 nt, Artificial Sequence
  Description of Artificial Sequence: Synthetic oligonucleotide
gccaauuaaauggauggcu

SEQ ID NO: 2529 - RNA, 19 nt, Artificial Sequence
  Description of Artificial Sequence: Synthetic oligonucleotide
gcuggaggcugcucaggac

SEQ ID NO: 2530 - RNA, 19 nt, Artificial Sequence
  Description of Artificial Sequence: Synthetic oligonucleotide
ggaggcugcucaggaccua

SEQ ID NO: 2531 - RNA, 19 nt, Artificial Sequence
  Description of Artificial Sequence: Synthetic oligonucleotide
guuccagucccugaaggaa

SEQ ID NO: 2532 - RNA, 19 nt, Artificial Sequence
  Description of Artificial Sequence: Synthetic oligonucleotide
uaaaaguccuuggcucagg

SEQ ID NO: 2533 - RNA, 19 nt, Artificial Sequence
  Description of Artificial Sequence: Synthetic oligonucleotide
ucacaacugcugcuuaacu

SEQ ID NO: 2534 - RNA, 19 nt, Artificial Sequence
  Description of Artificial Sequence: Synthetic oligonucleotide
ucucuuauuccuuuaucac

SEQ ID NO: 2535 - RNA, 19 nt, Artificial Sequence
  Description of Artificial Sequence: Synthetic oligonucleotide
ugaacgucuuucggacagu

SEQ ID NO: 2536 - RNA, 19 nt, Artificial Sequence
  Description of Artificial Sequence: Synthetic oligonucleotide
ugacguuuggagcuaugga

SEQ ID NO: 2537 - RNA, 19 nt, Artificial Sequence
  Description of Artificial Sequence: Synthetic oligonucleotide
ugcuggaggcugcucagga

SEQ ID NO: 2538 - RNA, 19 nt, Artificial Sequence
  Description of Artificial Sequence: Synthetic oligonucleotide
uggaggcugcucaggaccu

SEQ ID NO: 2539 - RNA, 19 nt, Artificial Sequence
  Description of Artificial Sequence: Synthetic oligonucleotide
aaaauucccgucgcuauca

SEQ ID NO: 2540 - RNA, 19 nt, Artificial Sequence
  Description of Artificial Sequence: Synthetic oligonucleotide
aaauucccgucgcuaucaa

SEQ ID NO: 2541 - RNA, 19 nt, Artificial Sequence
  Description of Artificial Sequence: Synthetic oligonucleotide
aacaucuccgaaagccaac

SEQ ID NO: 2542 - RNA, 19 nt, Artificial Sequence
  Description of Artificial Sequence: Synthetic oligonucleotide
aagggacucuggaucccag

SEQ ID NO: 2543 - RNA, 19 nt, Artificial Sequence
  Description of Artificial Sequence: Synthetic oligonucleotide
acugccuggucugccgcaa

SEQ ID NO: 2544 - RNA, 19 nt, Artificial Sequence
  Description of Artificial Sequence: Synthetic oligonucleotide
agaaaguuaaaauucccgu

SEQ ID NO: 2545 - RNA, 19 nt, Artificial Sequence
  Description of Artificial Sequence: Synthetic oligonucleotide
agagggagcuuguggagcc

SEQ ID NO: 2546 - RNA, 19 nt, Artificial Sequence
  Description of Artificial Sequence: Synthetic oligonucleotide
agccacccauauguaccau

SEQ ID NO: 2547 - RNA, 19 nt, Artificial Sequence
  Description of Artificial Sequence: Synthetic oligonucleotide
agcuuguggagccucuuac

SEQ ID NO: 2548 - RNA, 19 nt, Artificial Sequence
  Description of Artificial Sequence: Synthetic oligonucleotide
aggagagggagcuugugga

SEQ ID NO: 2549 - RNA, 19 nt, Artificial Sequence
  Description of Artificial Sequence: Synthetic oligonucleotide
aggcugcugcaggagaggg

SEQ ID NO: 2550 - RNA, 19 nt, Artificial Sequence
  Description of Artificial Sequence: Synthetic oligonucleotide
agggacucuggaucccaga

SEQ ID NO: 2551 - RNA, 19 nt, Artificial Sequence
  Description of Artificial Sequence: Synthetic oligonucleotide
agggagcuuguggagccuc

SEQ ID NO: 2552 - RNA, 19 nt, Artificial Sequence
  Description of Artificial Sequence: Synthetic oligonucleotide
auaagggacucuggauccc

SEQ ID NO: 2553 - RNA, 19 nt, Artificial Sequence
  Description of Artificial Sequence: Synthetic oligonucleotide
auccaggagguggcugguu

SEQ ID NO: 2554 - RNA, 19 nt, Artificial Sequence
  Description of Artificial Sequence: Synthetic oligonucleotide
aucuccgaaagccaacaag

SEQ ID NO: 2555 - RNA, 19 nt, Artificial Sequence
  Description of Artificial Sequence: Synthetic oligonucleotide
aucugccucaccuccaccg

SEQ ID NO: 2556 - RNA, 19 nt, Artificial Sequence
  Description of Artificial Sequence: Synthetic oligonucleotide
auuggcucccaguaccugc

SEQ ID NO: 2557 - RNA, 19 nt, Artificial Sequence
  Description of Artificial Sequence: Synthetic oligonucleotide
cagccacccauauguacca

SEQ ID NO: 2558 - RNA, 19 nt, Artificial Sequence
  Description of Artificial Sequence: Synthetic oligonucleotide
caggagagggagcuugugg

SEQ ID NO: 2559 - RNA, 19 nt, Artificial Sequence
  Description of Artificial Sequence: Synthetic oligonucleotide
cagugggcaaccccgagua

SEQ ID NO: 2560 - RNA, 19 nt, Artificial Sequence
  Description of Artificial Sequence: Synthetic oligonucleotide
ccgcgcccagcagagaccc

SEQ ID NO: 2561 - RNA, 19 nt, Artificial Sequence
  Description of Artificial Sequence: Synthetic oligonucleotide
ccucaccuccaccgugcag

SEQ ID NO: 2562 - RNA, 19 nt, Artificial Sequence
  Description of Artificial Sequence: Synthetic oligonucleotide
cgaugaagccuacgugaug

SEQ ID NO: 2563 - RNA, 19 nt, Artificial Sequence
  Description of Artificial Sequence: Synthetic oligonucleotide
cgcgcccagcagagaccca

SEQ ID NO: 2564 - RNA, 19 nt, Artificial Sequence
  Description of Artificial Sequence: Synthetic oligonucleotide
cgugucccaccagagcggg

SEQ ID NO: 2565 - RNA, 19 nt, Artificial Sequence
  Description of Artificial Sequence: Synthetic oligonucleotide
cuauacccaccagagugau

SEQ ID NO: 2566 - RNA, 19 nt, Artificial Sequence
  Description of Artificial Sequence: Synthetic oligonucleotide
cucaccuccaccgugcagc

SEQ ID NO: 2567 - RNA, 19 nt, Artificial Sequence
  Description of Artificial Sequence: Synthetic oligonucleotide
cuccgaaagccaacaagga

SEQ ID NO: 2568 - RNA, 19 nt, Artificial Sequence
  Description of Artificial Sequence: Synthetic oligonucleotide
cugcaggagagggagcuug

SEQ ID NO: 2569 - RNA, 19 nt, Artificial Sequence
  Description of Artificial Sequence: Synthetic oligonucleotide
cugccucaccuccaccgug

SEQ ID NO: 2570 - RNA, 19 nt, Artificial Sequence
  Description of Artificial Sequence: Synthetic oligonucleotide
cuggaucccagaaggugag

SEQ ID NO: 2571 - RNA, 19 nt, Artificial Sequence
  Description of Artificial Sequence: Synthetic oligonucleotide
cuuguggagccucuuacac

SEQ ID NO: 2572 - RNA, 19 nt, Artificial Sequence
  Description of Artificial Sequence: Synthetic oligonucleotide
gaauucuccaaaauggccc

SEQ ID NO: 2573 - RNA, 19 nt, Artificial Sequence
  Description of Artificial Sequence: Synthetic oligonucleotide
gacuauguccgggaacaca

SEQ ID NO: 2574 - RNA, 19 nt, Artificial Sequence
  Description of Artificial Sequence: Synthetic oligonucleotide
gacugccuggucugccgca

SEQ ID NO: 2575 - RNA, 19 nt, Artificial Sequence
  Description of Artificial Sequence: Synthetic oligonucleotide
gagaaaguuaaaauucccg

SEQ ID NO: 2576 - RNA, 19 nt, Artificial Sequence
  Description of Artificial Sequence: Synthetic oligonucleotide
gagagggagcuuguggagc

SEQ ID NO: 2577 - RNA, 19 nt, Artificial Sequence
  Description of Artificial Sequence: Synthetic oligonucleotide
gagcuuguggagccucuua

SEQ ID NO: 2578 - RNA, 19 nt, Artificial Sequence
  Description of Artificial Sequence: Synthetic oligonucleotide
gaggcugcugcaggagagg

SEQ ID NO: 2579 - RNA, 19 nt, Artificial Sequence
  Description of Artificial Sequence: Synthetic oligonucleotide
gcacgcugcggaggcugcu

SEQ ID NO: 2580 - RNA, 19 nt, Artificial Sequence
  Description of Artificial Sequence: Synthetic oligonucleotide
gcaggagagggagcuugug

SEQ ID NO: 2581 - RNA, 19 nt, Artificial Sequence
  Description of Artificial Sequence: Synthetic oligonucleotide
gcagugggcaaccccgagu

SEQ ID NO: 2582 - RNA, 19 nt, Artificial Sequence
  Description of Artificial Sequence: Synthetic oligonucleotide
gccucaccuccaccgugca

SEQ ID NO: 2583 - RNA, 19 nt, Artificial Sequence
  Description of Artificial Sequence: Synthetic oligonucleotide
gcugcaggagagggagcuu

SEQ ID NO: 2584 - RNA, 19 nt, Artificial Sequence
  Description of Artificial Sequence: Synthetic oligonucleotide
gcugcugcaggagagggag

SEQ ID NO: 2585 - RNA, 19 nt, Artificial Sequence
  Description of Artificial Sequence: Synthetic oligonucleotide
gcugggcaucugccucacc

SEQ ID NO: 2586 - RNA, 19 nt, Artificial Sequence
  Description of Artificial Sequence: Synthetic oligonucleotide
gcuuguggagccucuuaca

SEQ ID NO: 2587 - RNA, 19 nt, Artificial Sequence
  Description of Artificial Sequence: Synthetic oligonucleotide
ggacuauguccgggaacac

SEQ ID NO: 2588 - RNA, 19 nt, Artificial Sequence
  Description of Artificial Sequence: Synthetic oligonucleotide
ggagagggagcuuguggag

SEQ ID NO: 2589 - RNA, 19 nt, Artificial Sequence
  Description of Artificial Sequence: Synthetic oligonucleotide
ggagcugcuggggugcagg

SEQ ID NO: 2590 - RNA, 19 nt, Artificial Sequence
  Description of Artificial Sequence: Synthetic oligonucleotide
ggagcuuguggagccucuu

SEQ ID NO: 2591 - RNA, 19 nt, Artificial Sequence
  Description of Artificial Sequence: Synthetic oligonucleotide
ggaggcugcugcaggagag

SEQ ID NO: 2592 - RNA, 19 nt, Artificial Sequence
  Description of Artificial Sequence: Synthetic oligonucleotide
ggaucccagaaggugagaa

SEQ ID NO: 2593 - RNA, 19 nt, Artificial Sequence
  Description of Artificial Sequence: Synthetic oligonucleotide
ggcugcugcaggagaggga

SEQ ID NO: 2594 - RNA, 19 nt, Artificial Sequence
  Description of Artificial Sequence: Synthetic oligonucleotide
gggagcugcuggggugcag

SEQ ID NO: 2595 - RNA, 19 nt, Artificial Sequence
  Description of Artificial Sequence: Synthetic oligonucleotide
gggagcuuguggagccucu

SEQ ID NO: 2596 - RNA, 19 nt, Artificial Sequence
  Description of Artificial Sequence: Synthetic oligonucleotide
gggcugcaaagcuguccca

SEQ ID NO: 2597 - RNA, 19 nt, Artificial Sequence
  Description of Artificial Sequence: Synthetic oligonucleotide
ggugagaaaguuaaaauuc

SEQ ID NO: 2598 - RNA, 19 nt, Artificial Sequence
  Description of Artificial Sequence: Synthetic oligonucleotide
gugagaaaguuaaaauucc

SEQ ID NO: 2599 - RNA, 19 nt, Artificial Sequence
  Description of Artificial Sequence: Synthetic oligonucleotide
gugccgccugcugggcauc

SEQ ID NO: 2600 - RNA, 19 nt, Artificial Sequence
  Description of Artificial Sequence: Synthetic oligonucleotide
gugugccgccugcugggca

SEQ ID NO: 2601 - RNA, 19 nt, Artificial Sequence
  Description of Artificial Sequence: Synthetic oligonucleotide
uaccugcucaacuggugug

SEQ ID NO: 2602 - RNA, 19 nt, Artificial Sequence
  Description of Artificial Sequence: Synthetic oligonucleotide
uauaagggacucuggaucc

SEQ ID NO: 2603 - RNA, 19 nt, Artificial Sequence
  Description of Artificial Sequence: Synthetic oligonucleotide
ucaccuccaccgugcagcu

SEQ ID NO: 2604 - RNA, 19 nt, Artificial Sequence
  Description of Artificial Sequence: Synthetic oligonucleotide
uccgaaagccaacaaggaa

SEQ ID NO: 2605 - RNA, 19 nt, Artificial Sequence
  Description of Artificial Sequence: Synthetic oligonucleotide
ucgaauucuccaaaauggc

SEQ ID NO: 2606 - RNA, 19 nt, Artificial Sequence
  Description of Artificial Sequence: Synthetic oligonucleotide
ucgaugaagccuacgugau

SEQ ID NO: 2607 - RNA, 19 nt, Artificial Sequence
  Description of Artificial Sequence: Synthetic oligonucleotide
ucuccgaaagccaacaagg

SEQ ID NO: 2608 - RNA, 19 nt, Artificial Sequence
  Description of Artificial Sequence: Synthetic oligonucleotide
ugcaggagagggagcuugu

SEQ ID NO: 2609 - RNA, 19 nt, Artificial Sequence
  Description of Artificial Sequence: Synthetic oligonucleotide
ugcagugggcaaccccgag

SEQ ID NO: 2610 - RNA, 19 nt, Artificial Sequence
  Description of Artificial Sequence: Synthetic oligonucleotide
ugccucaccuccaccgugc

SEQ ID NO: 2611 - RNA, 19 nt, Artificial Sequence
  Description of Artificial Sequence: Synthetic oligonucleotide
uggacuauguccgggaaca

SEQ ID NO: 2612 - RNA, 19 nt, Artificial Sequence
  Description of Artificial Sequence: Synthetic oligonucleotide
uggaucccagaaggugaga

SEQ ID NO: 2613 - RNA, 19 nt, Artificial Sequence
  Description of Artificial Sequence: Synthetic oligonucleotide
uggcucccaguaccugcuc

SEQ ID NO: 2614 - RNA, 19 nt, Artificial Sequence
  Description of Artificial Sequence: Synthetic oligonucleotide
ugugccgccugcugggcau

SEQ ID NO: 2615 - RNA, 19 nt, Artificial Sequence
  Description of Artificial Sequence: Synthetic oligonucleotide
uuguggagccucuuacacc

SEQ ID NO: 2616 - RNA, 19 nt, Artificial Sequence
  Description of Artificial Sequence: Synthetic oligonucleotide
accuggcagccaggaacgu

SEQ ID NO: 2617 - RNA, 19 nt, Artificial Sequence
  Description of Artificial Sequence: Synthetic oligonucleotide
caaugggagcugcuggggu

SEQ ID NO: 2618 - RNA, 19 nt, Artificial Sequence
  Description of Artificial Sequence: Synthetic oligonucleotide
cacacauacuccuccucug

SEQ ID NO: 2619 - RNA, 19 nt, Artificial Sequence
  Description of Artificial Sequence: Synthetic oligonucleotide
guccccguaauuauguggu

SEQ ID NO: 2620 - RNA, 19 nt, Artificial Sequence
  Description of Artificial Sequence: Synthetic oligonucleotide
gugaggugguccuugggaa

SEQ ID NO: 2621 - RNA, 19 nt, Artificial Sequence
  Description of Artificial Sequence: Synthetic oligonucleotide
uccccguaauuauguggug

SEQ ID NO: 2622 - RNA, 19 nt, Artificial Sequence
  Description of Artificial Sequence: Synthetic oligonucleotide
uguccccguaauuaugugg

SEQ ID NO: 2623 - RNA, 19 nt, Artificial Sequence
  Description of Artificial Sequence: Synthetic oligonucleotide
ugugaggugguccuuggga

SEQ ID NO: 2624 - RNA, 19 nt, Artificial Sequence
  Description of Artificial Sequence: Synthetic oligonucleotide
aacccugacuaccagcagg

SEQ ID NO: 2625 - RNA, 19 nt, Artificial Sequence
  Description of Artificial Sequence: Synthetic oligonucleotide
aacugugaggugguccuug

SEQ ID NO: 2626 - RNA, 19 nt, Artificial Sequence
  Description of Artificial Sequence: Synthetic oligonucleotide
acauuugcagauguuuuag

SEQ ID NO: 2627 - RNA, 19 nt, Artificial Sequence
  Description of Artificial Sequence: Synthetic oligonucleotide
acggggaccagacaacugu

SEQ ID NO: 2628 - RNA, 19 nt, Artificial Sequence
  Description of Artificial Sequence: Synthetic oligonucleotide
acugugaggugguccuugg

SEQ ID NO: 2629 - RNA, 19 nt, Artificial Sequence
  Description of Artificial Sequence: Synthetic oligonucleotide
auaacugugaggugguccu

SEQ ID NO: 2630 - RNA, 19 nt, Artificial Sequence
  Description of Artificial Sequence: Synthetic oligonucleotide
caaacugcaccuacggguc

SEQ ID NO: 2631 - RNA, 19 nt, Artificial Sequence
  Description of Artificial Sequence: Synthetic oligonucleotide
cauuugcagauguuuuaga

SEQ ID NO: 2632 - RNA, 19 nt, Artificial Sequence
  Description of Artificial Sequence: Synthetic oligonucleotide
cccugacuaccagcaggac

SEQ ID NO: 2633 - RNA, 19 nt, Artificial Sequence
  Description of Artificial Sequence: Synthetic oligonucleotide
ccugacuaccagcaggacu

SEQ ID NO: 2634 - RNA, 19 nt, Artificial Sequence
  Description of Artificial Sequence: Synthetic oligonucleotide
cggggaccagacaacugua

SEQ ID NO: 2635 - RNA, 19 nt, Artificial Sequence
  Description of Artificial Sequence: Synthetic oligonucleotide
cucagccacccauauguac

SEQ ID NO: 2636 - RNA, 19 nt, Artificial Sequence
  Description of Artificial Sequence: Synthetic oligonucleotide
gacggggaccagacaacug

SEQ ID NO: 2637 - RNA, 19 nt, Artificial Sequence
  Description of Artificial Sequence: Synthetic oligonucleotide
gcaugucaagaucacagau

SEQ ID NO: 2638 - RNA, 19 nt, Artificial Sequence
  Description of Artificial Sequence: Synthetic oligonucleotide
ggacggggaccagacaacu

SEQ ID NO: 2639 - RNA, 19 nt, Artificial Sequence
  Description of Artificial Sequence: Synthetic oligonucleotide
gugugccaccugugccauc

SEQ ID NO: 2640 - RNA, 19 nt, Artificial Sequence
  Description of Artificial Sequence: Synthetic oligonucleotide
ucccucagccacccauaug

SEQ ID NO: 2641 - RNA, 19 nt, Artificial Sequence
  Description of Artificial Sequence: Synthetic oligonucleotide
ugugccaccugugccaucc

SEQ ID NO: 2642 - RNA, 19 nt, Artificial Sequence
  Description of Artificial Sequence: Synthetic oligonucleotide
aagcauacgugauggcugg

SEQ ID NO: 2643 - RNA, 19 nt, Artificial Sequence
  Description of Artificial Sequence: Synthetic oligonucleotide
aagggcaucuggaucccug

SEQ ID NO: 2644 - RNA, 19 nt, Artificial Sequence
  Description of Artificial Sequence: Synthetic oligonucleotide
acagaguaccaugcagaug

SEQ ID NO: 2645 - RNA, 19 nt, Artificial Sequence
  Description of Artificial Sequence: Synthetic oligonucleotide
acaugggggaccuggugga

SEQ ID NO: 2646 - RNA, 19 nt, Artificial Sequence
  Description of Artificial Sequence: Synthetic oligonucleotide
acccaccagagcggggggc

SEQ ID NO: 2647 - RNA, 19 nt, Artificial Sequence
  Description of Artificial Sequence: Synthetic oligonucleotide
acgaauucugcacaauggc

SEQ ID NO: 2648 - RNA, 19 nt, Artificial Sequence
  Description of Artificial Sequence: Synthetic oligonucleotide
acgagacagaguaccaugc

SEQ ID NO: 2649 - RNA, 19 nt, Artificial Sequence
  Description of Artificial Sequence: Synthetic oligonucleotide
acggagcugguggagccgc

SEQ ID NO: 2650 - RNA, 19 nt, Artificial Sequence
  Description of Artificial Sequence: Synthetic oligonucleotide
acugcugccaugagcagug

SEQ ID NO: 2651 - RNA, 19 nt, Artificial Sequence
  Description of Artificial Sequence: Synthetic oligonucleotide
agaaugugaaaauuccagu

SEQ ID NO: 2652 - RNA, 19 nt, Artificial Sequence
  Description of Artificial Sequence: Synthetic oligonucleotide
agaguaccaugcagauggg

SEQ ID NO: 2653 - RNA, 19 nt, Artificial Sequence
  Description of Artificial Sequence: Synthetic oligonucleotide
agcugguggagccgcugac

SEQ ID NO: 2654 - RNA, 19 nt, Artificial Sequence
  Description of Artificial Sequence: Synthetic oligonucleotide
agggcaucuggaucccuga

SEQ ID NO: 2655 - RNA, 19 nt, Artificial Sequence
  Description of Artificial Sequence: Synthetic oligonucleotide
aguaccaugcagauggggg

SEQ ID NO: 2656 - RNA, 19 nt, Artificial Sequence
  Description of Artificial Sequence: Synthetic oligonucleotide
aucugccugacauccacgg

SEQ ID NO: 2657 - RNA, 19 nt, Artificial Sequence
  Description of Artificial Sequence: Synthetic oligonucleotide
augcagaugggggcaaggu

SEQ ID NO: 2658 - RNA, 19 nt, Artificial Sequence
  Description of Artificial Sequence: Synthetic oligonucleotide
augggggaccugguggaug

SEQ ID NO: 2659 - RNA, 19 nt, Artificial Sequence
  Description of Artificial Sequence: Synthetic oligonucleotide
cagaguaccaugcagaugg

SEQ ID NO: 2660 - RNA, 19 nt, Artificial Sequence
  Description of Artificial Sequence: Synthetic oligonucleotide
cagaugggggcaaggugcc

SEQ ID NO: 2661 - RNA, 19 nt, Artificial Sequence
  Description of Artificial Sequence: Synthetic oligonucleotide
cagcagggcuucuucuguc

SEQ ID NO: 2662 - RNA, 19 nt, Artificial Sequence
  Description of Artificial Sequence: Synthetic oligonucleotide
caucugccugacauccacg

SEQ ID NO: 2663 - RNA, 19 nt, Artificial Sequence
  Description of Artificial Sequence: Synthetic oligonucleotide
caugcagaugggggcaagg

SEQ ID NO: 2664 - RNA, 19 nt, Artificial Sequence
  Description of Artificial Sequence: Synthetic oligonucleotide
cauggccagggacccccag

SEQ ID NO: 2665 - RNA, 19 nt, Artificial Sequence
  Description of Artificial Sequence: Synthetic oligonucleotide
caugggggaccugguggau

SEQ ID NO: 2666 - RNA, 19 nt, Artificial Sequence
  Description of Artificial Sequence: Synthetic oligonucleotide
ccacugacugcugccauga

SEQ ID NO: 2667 - RNA, 19 nt, Artificial Sequence
  Description of Artificial Sequence: Synthetic oligonucleotide
ccagcagggcuucuucugu

SEQ ID NO: 2668 - RNA, 19 nt, Artificial Sequence
  Description of Artificial Sequence: Synthetic oligonucleotide
ccagggacccccagcgcuu

SEQ ID NO: 2669 - RNA, 19 nt, Artificial Sequence
  Description of Artificial Sequence: Synthetic oligonucleotide
ccaugcagaugggggcaag

SEQ ID NO: 2670 - RNA, 19 nt, Artificial Sequence
  Description of Artificial Sequence: Synthetic oligonucleotide
cccaccagagcggggggcu

SEQ ID NO: 2671 - RNA, 19 nt, Artificial Sequence
  Description of Artificial Sequence: Synthetic oligonucleotide
cccacugacugcugccaug

SEQ ID NO: 2672 - RNA, 19 nt, Artificial Sequence
  Description of Artificial Sequence: Synthetic oligonucleotide
ccccgccgagcagagagcc

SEQ ID NO: 2673 - RNA, 19 nt, Artificial Sequence
  Description of Artificial Sequence: Synthetic oligonucleotide
cccgccgagcagagagcca

SEQ ID NO: 2674 - RNA, 19 nt, Artificial Sequence
  Description of Artificial Sequence: Synthetic oligonucleotide
ccgugccacccugaguguc

SEQ ID NO: 2675 - RNA, 19 nt, Artificial Sequence
  Description of Artificial Sequence: Synthetic oligonucleotide
ccugacauccacggugcag

SEQ ID NO: 2676 - RNA, 19 nt, Artificial Sequence
  Description of Artificial Sequence: Synthetic oligonucleotide
cgaauucugcacaauggcg

SEQ ID NO: 2677 - RNA, 19 nt, Artificial Sequence
  Description of Artificial Sequence: Synthetic oligonucleotide
cgagacagaguaccaugca

SEQ ID NO: 2678 - RNA, 19 nt, Artificial Sequence
  Description of Artificial Sequence: Synthetic oligonucleotide
cggagcugguggagccgcu

SEQ ID NO: 2679 - RNA, 19 nt, Artificial Sequence
  Description of Artificial Sequence: Synthetic oligonucleotide
cucccgccuucugggcauc

SEQ ID NO: 2680 - RNA, 19 nt, Artificial Sequence
  Description of Artificial Sequence: Synthetic oligonucleotide
cugacauccacggugcagc

SEQ ID NO: 2681 - RNA, 19 nt, Artificial Sequence
  Description of Artificial Sequence: Synthetic oligonucleotide
cugccaugagcagugugcu

SEQ ID NO: 2682 - RNA, 19 nt, Artificial Sequence
  Description of Artificial Sequence: Synthetic oligonucleotide
cugccugacauccacggug

SEQ ID NO: 2683 - RNA, 19 nt, Artificial Sequence
  Description of Artificial Sequence: Synthetic oligonucleotide
cugcugccaugagcagugu

SEQ ID NO: 2684 - RNA, 19 nt, Artificial Sequence
  Description of Artificial Sequence: Synthetic oligonucleotide
cugcuggucguggucuugg

SEQ ID NO: 2685 - RNA, 19 nt, Artificial Sequence
  Description of Artificial Sequence: Synthetic oligonucleotide
cuggaucccugauggggag

SEQ ID NO: 2686 - RNA, 19 nt, Artificial Sequence
  Description of Artificial Sequence: Synthetic oligonucleotide
cugggcucccaggaccugc

SEQ ID NO: 2687 - RNA, 19 nt, Artificial Sequence
  Description of Artificial Sequence: Synthetic oligonucleotide
cugguggagccgcugacac

SEQ ID NO: 2688 - RNA, 19 nt, Artificial Sequence
  Description of Artificial Sequence: Synthetic oligonucleotide
gaagcauacgugauggcug

SEQ ID NO: 2689 - RNA, 19 nt, Artificial Sequence
  Description of Artificial Sequence: Synthetic oligonucleotide
gaauucugcacaauggcgc

SEQ ID NO: 2690 - RNA, 19 nt, Artificial Sequence
  Description of Artificial Sequence: Synthetic oligonucleotide
gacagaguaccaugcagau

SEQ ID NO: 2691 - RNA, 19 nt, Artificial Sequence
  Description of Artificial Sequence: Synthetic oligonucleotide
gacaugggggaccuggugg

SEQ ID NO: 2692 - RNA, 19 nt, Artificial Sequence
  Description of Artificial Sequence: Synthetic oligonucleotide
gacccaccagagcgggggg

SEQ ID NO: 2693 - RNA, 19 nt, Artificial Sequence
  Description of Artificial Sequence: Synthetic oligonucleotide
gacgagacagaguaccaug

SEQ ID NO: 2694 - RNA, 19 nt, Artificial Sequence
  Description of Artificial Sequence: Synthetic oligonucleotide
gacugcugccaugagcagu

SEQ ID NO: 2695 - RNA, 19 nt, Artificial Sequence
  Description of Artificial Sequence: Synthetic oligonucleotide
gagcagugugcugccggcu

SEQ ID NO: 2696 - RNA, 19 nt, Artificial Sequence
  Description of Artificial Sequence: Synthetic oligonucleotide
gagcugguggagccgcuga

SEQ ID NO: 2697 - RNA, 19 nt, Artificial Sequence
  Description of Artificial Sequence: Synthetic oligonucleotide
gaguaccaugcagaugggg

SEQ ID NO: 2698 - RNA, 19 nt, Artificial Sequence
  Description of Artificial Sequence: Synthetic oligonucleotide
gcagaugggggcaaggugc

SEQ ID NO: 2699 - RNA, 19 nt, Artificial Sequence
  Description of Artificial Sequence: Synthetic oligonucleotide
gcagauugccaaggggaug

SEQ ID NO: 2700 - RNA, 19 nt, Artificial Sequence
  Description of Artificial Sequence: Synthetic oligonucleotide
gccacccugagugucagcc

SEQ ID NO: 2701 - RNA, 19 nt, Artificial Sequence
  Description of Artificial Sequence: Synthetic oligonucleotide
gccaugagcagugugcugc

SEQ ID NO: 2702 - RNA, 19 nt, Artificial Sequence
  Description of Artificial Sequence: Synthetic oligonucleotide
gcccacugacugcugccau

SEQ ID NO: 2703 - RNA, 19 nt, Artificial Sequence
  Description of Artificial Sequence: Synthetic oligonucleotide
gccggcugcacgggcccca

SEQ ID NO: 2704 - RNA, 19 nt, Artificial Sequence
  Description of Artificial Sequence: Synthetic oligonucleotide
gccugaauaugugaaccag

SEQ ID NO: 2705 - RNA, 19 nt, Artificial Sequence
  Description of Artificial Sequence: Synthetic oligonucleotide
gccugacauccacggugca

SEQ ID NO: 2706 - RNA, 19 nt, Artificial Sequence
  Description of Artificial Sequence: Synthetic oligonucleotide
gcuggucguggucuugggg

SEQ ID NO: 2707 - RNA, 19 nt, Artificial Sequence
  Description of Artificial Sequence: Synthetic oligonucleotide
gcugguggagccgcugaca

SEQ ID NO: 2708 - RNA, 19 nt, Artificial Sequence
  Description of Artificial Sequence: Synthetic oligonucleotide
ggacccaccagagcggggg

SEQ ID NO: 2709 - RNA, 19 nt, Artificial Sequence
  Description of Artificial Sequence: Synthetic oligonucleotide
ggagcugguggagccgcug

SEQ ID NO: 2710 - RNA, 19 nt, Artificial Sequence
  Description of Artificial Sequence: Synthetic oligonucleotide
ggaucccugauggggagaa

SEQ ID NO: 2711 - RNA, 19 nt, Artificial Sequence
  Description of Artificial Sequence: Synthetic oligonucleotide
gggagaaugugaaaauucc

SEQ ID NO: 2712 - RNA, 19 nt, Artificial Sequence
  Description of Artificial Sequence: Synthetic oligonucleotide
gggcucccaggaccugcug

SEQ ID NO: 2713 - RNA, 19 nt, Artificial Sequence
  Description of Artificial Sequence: Synthetic oligonucleotide
ggggagaaugugaaaauuc

SEQ ID NO: 2714 - RNA, 19 nt, Artificial Sequence
  Description of Artificial Sequence: Synthetic oligonucleotide
guaccaugcagaugggggc

SEQ ID NO: 2715 - RNA, 19 nt, Artificial Sequence
  Description of Artificial Sequence: Synthetic oligonucleotide
guaccccagcagggcuucu

SEQ ID NO: 2716 - RNA, 19 nt, Artificial Sequence
  Description of Artificial Sequence: Synthetic oligonucleotide
gucucccgccuucugggca

SEQ ID NO: 2717 - RNA, 19 nt, Artificial Sequence
  Description of Artificial Sequence: Synthetic oligonucleotide
gugccacccugagugucag

SEQ ID NO: 2718 - RNA, 19 nt, Artificial Sequence
  Description of Artificial Sequence: Synthetic oligonucleotide
guggagccgcugacaccua

SEQ ID NO: 2719 - RNA, 19 nt, Artificial Sequence
  Description of Artificial Sequence: Synthetic oligonucleotide
uacgugauggcuggugugg

SEQ ID NO: 2720 - RNA, 19 nt, Artificial Sequence
  Description of Artificial Sequence: Synthetic oligonucleotide
ucucccgccuucugggcau

SEQ ID NO: 2721 - RNA, 19 nt, Artificial Sequence
  Description of Artificial Sequence: Synthetic oligonucleotide
ucugccugacauccacggu

SEQ ID NO: 2722 - RNA, 19 nt, Artificial Sequence
  Description of Artificial Sequence: Synthetic oligonucleotide
ucuggaucccugaugggga

SEQ ID NO: 2723 - RNA, 19 nt, Artificial Sequence
  Description of Artificial Sequence: Synthetic oligonucleotide
ucugggcaucugccugaca

SEQ ID NO: 2724 - RNA, 19 nt, Artificial Sequence
  Description of Artificial Sequence: Synthetic oligonucleotide
ugacauccacggugcagcu

SEQ ID NO: 2725 - RNA, 19 nt, Artificial Sequence
  Description of Artificial Sequence: Synthetic oligonucleotide
ugacugcugccaugagcag

SEQ ID NO: 2726 - RNA, 19 nt, Artificial Sequence
  Description of Artificial Sequence: Synthetic oligonucleotide
ugaugacuuuuggggccaa

SEQ ID NO: 2727 - RNA, 19 nt, Artificial Sequence
  Description of Artificial Sequence: Synthetic oligonucleotide
ugcagaugggggcaaggug

SEQ ID NO: 2728 - RNA, 19 nt, Artificial Sequence
  Description of Artificial Sequence: Synthetic oligonucleotide
ugcagauugccaaggggau

SEQ ID NO: 2729 - RNA, 19 nt, Artificial Sequence
  Description of Artificial Sequence: Synthetic oligonucleotide
ugccacccugagugucagc

SEQ ID NO: 2730 - RNA, 19 nt, Artificial Sequence
  Description of Artificial Sequence: Synthetic oligonucleotide
ugccaugagcagugugcug

SEQ ID NO: 2731 - RNA, 19 nt, Artificial Sequence
  Description of Artificial Sequence: Synthetic oligonucleotide
ugcccacugacugcugcca

SEQ ID NO: 2732 - RNA, 19 nt, Artificial Sequence
  Description of Artificial Sequence: Synthetic oligonucleotide
ugccgugccacccugagug

SEQ ID NO: 2733 - RNA, 19 nt, Artificial Sequence
  Description of Artificial Sequence: Synthetic oligonucleotide
ugccugacauccacggugc

SEQ ID NO: 2734 - RNA, 19 nt, Artificial Sequence
  Description of Artificial Sequence: Synthetic oligonucleotide
ugcuggucguggucuuggg

SEQ ID NO: 2735 - RNA, 19 nt, Artificial Sequence
  Description of Artificial Sequence: Synthetic oligonucleotide
uggagccgcugacaccuag

SEQ ID NO: 2736 - RNA, 19 nt, Artificial Sequence
  Description of Artificial Sequence: Synthetic oligonucleotide
uggaucccugauggggaga

SEQ ID NO: 2737 - RNA, 19 nt, Artificial Sequence
  Description of Artificial Sequence: Synthetic oligonucleotide
ugggggaccugguggaugc

SEQ ID NO: 2738 - RNA, 19 nt, Artificial Sequence
  Description of Artificial Sequence: Synthetic oligonucleotide
ugguggagccgcugacacc

SEQ ID NO: 2739 - RNA, 19 nt, Artificial Sequence
  Description of Artificial Sequence: Synthetic oligonucleotide
accucuaccagggcugcca

SEQ ID NO: 2740 - RNA, 19 nt, Artificial Sequence
  Description of Artificial Sequence: Synthetic oligonucleotide
agacggagcugaggaaggu

SEQ ID NO: 2741 - RNA, 19 nt, Artificial Sequence
  Description of Artificial Sequence: Synthetic oligonucleotide
agaugaugaggaugaaaac

SEQ ID NO: 2742 - RNA, 19 nt, Artificial Sequence
  Description of Artificial Sequence: Synthetic oligonucleotide
agcucugcuaccaggacac

SEQ ID NO: 2743 - RNA, 19 nt, Artificial Sequence
  Description of Artificial Sequence: Synthetic oligonucleotide
aggaaggugaaggugcuug

SEQ ID NO: 2744 - RNA, 19 nt, Artificial Sequence
  Description of Artificial Sequence: Synthetic oligonucleotide
aguuauggugugacugugu

SEQ ID NO: 2745 - RNA, 19 nt, Artificial Sequence
  Description of Artificial Sequence: Synthetic oligonucleotide
auugccaaggggaugagcu

SEQ ID NO: 2746 - RNA, 19 nt, Artificial Sequence
  Description of Artificial Sequence: Synthetic oligonucleotide
cagcucugcuaccaggaca

SEQ ID NO: 2747 - RNA, 19 nt, Artificial Sequence
  Description of Artificial Sequence: Synthetic oligonucleotide
ccaaggggaugagcuaccu

SEQ ID NO: 2748 - RNA, 19 nt, Artificial Sequence
  Description of Artificial Sequence: Synthetic oligonucleotide
ccagcucugcuaccaggac

SEQ ID NO: 2749 - RNA, 19 nt, Artificial Sequence
  Description of Artificial Sequence: Synthetic oligonucleotide
cccaccucugcuucgugca

SEQ ID NO: 2750 - RNA, 19 nt, Artificial Sequence
  Description of Artificial Sequence: Synthetic oligonucleotide
gaaagagacggagcugagg

SEQ ID NO: 2751 - RNA, 19 nt, Artificial Sequence
  Description of Artificial Sequence: Synthetic oligonucleotide
gagacggagcugaggaagg

SEQ ID NO: 2752 - RNA, 19 nt, Artificial Sequence
  Description of Artificial Sequence: Synthetic oligonucleotide
gaguuauggugugacugug

SEQ ID NO: 2753 - RNA, 19 nt, Artificial Sequence
  Description of Artificial Sequence: Synthetic oligonucleotide
gccaaggggaugagcuacc

SEQ ID NO: 2754 - RNA, 19 nt, Artificial Sequence
  Description of Artificial Sequence: Synthetic oligonucleotide
ggaaggugaaggugcuugg

SEQ ID NO: 2755 - RNA, 19 nt, Artificial Sequence
  Description of Artificial Sequence: Synthetic oligonucleotide
ggucguggucuugggggug

SEQ ID NO: 2756 - RNA, 19 nt, Artificial Sequence
  Description of Artificial Sequence: Synthetic oligonucleotide
gugaagaugaugaggauga

SEQ ID NO: 2757 - RNA, 19 nt, Artificial Sequence
  Description of Artificial Sequence: Synthetic oligonucleotide
guggaguuauggugugacu

SEQ ID NO: 2758 - RNA, 19 nt, Artificial Sequence
  Description of Artificial Sequence: Synthetic oligonucleotide
guggugcagggaaaccugg

SEQ ID NO: 2759 - RNA, 19 nt, Artificial Sequence
  Description of Artificial Sequence: Synthetic oligonucleotide
guuauggugugacugugug

SEQ ID NO: 2760 - RNA, 19 nt, Artificial Sequence
  Description of Artificial Sequence: Synthetic oligonucleotide
ugaaagagacggagcugag

SEQ ID NO: 2761 - RNA, 19 nt, Artificial Sequence
  Description of Artificial Sequence: Synthetic oligonucleotide
ugccaaggggaugagcuac

SEQ ID NO: 2762 - RNA, 19 nt, Artificial Sequence
  Description of Artificial Sequence: Synthetic oligonucleotide
ugcgaggcacccagcucuu

SEQ ID NO: 2763 - RNA, 19 nt, Artificial Sequence
  Description of Artificial Sequence: Synthetic oligonucleotide
uggccugccuccacuucaa

SEQ ID NO: 2764 - RNA, 19 nt, Artificial Sequence
  Description of Artificial Sequence: Synthetic oligonucleotide
uggucguggucuugggggu

SEQ ID NO: 2765 - RNA, 19 nt, Artificial Sequence
  Description of Artificial Sequence: Synthetic oligonucleotide
uggugcagggaaaccugga

SEQ ID NO: 2766 - RNA, 19 nt, Artificial Sequence
  Description of Artificial Sequence: Synthetic oligonucleotide
ugugcgaggcacccagcuc

SEQ ID NO: 2767 - RNA, 19 nt, Artificial Sequence
  Description of Artificial Sequence: Synthetic oligonucleotide
uuauggugugacugugugg

SEQ ID NO: 2768 - RNA, 19 nt, Artificial Sequence
  Description of Artificial Sequence: Synthetic oligonucleotide
uugccaaggggaugagcua

SEQ ID NO: 2769 - RNA, 19 nt, Artificial Sequence
  Description of Artificial Sequence: Synthetic oligonucleotide
uugugcgaggcacccagcu

SEQ ID NO: 2770 - RNA, 19 nt, Artificial Sequence
  Description of Artificial Sequence: Synthetic oligonucleotide
acacagcuuaugcccuaug

SEQ ID NO: 2771 - RNA, 19 nt, Artificial Sequence
  Description of Artificial Sequence: Synthetic oligonucleotide
acagcuuaugcccuauggc

SEQ ID NO: 2772 - RNA, 19 nt, Artificial Sequence
  Description of Artificial Sequence: Synthetic oligonucleotide
acagugaggaccccacagu

SEQ ID NO: 2773 - RNA, 19 nt, Artificial Sequence
  Description of Artificial Sequence: Synthetic oligonucleotide
agcagagagccagcccucu

SEQ ID NO: 2774 - RNA, 19 nt, Artificial Sequence
  Description of Artificial Sequence: Synthetic oligonucleotide
agcgguacagugaggaccc

SEQ ID NO: 2775 - RNA, 19 nt, Artificial Sequence
  Description of Artificial Sequence: Synthetic oligonucleotide
agcuggugacacagcuuau

SEQ ID NO: 2776 - RNA, 19 nt, Artificial Sequence
  Description of Artificial Sequence: Synthetic oligonucleotide
aggagggcugcuugaggaa

SEQ ID NO: 2777 - RNA, 19 nt, Artificial Sequence
  Description of Artificial Sequence: Synthetic oligonucleotide
augccagccuugccccauc

SEQ ID NO: 2778 - RNA, 19 nt, Artificial Sequence
  Description of Artificial Sequence: Synthetic oligonucleotide
caaccaugucaaaauuaca

SEQ ID NO: 2779 - RNA, 19 nt, Artificial Sequence
  Description of Artificial Sequence: Synthetic oligonucleotide
cacagcuuaugcccuaugg

SEQ ID NO: 2780 - RNA, 19 nt, Artificial Sequence
  Description of Artificial Sequence: Synthetic oligonucleotide
cagcgguacagugaggacc

SEQ ID NO: 2781 - RNA, 19 nt, Artificial Sequence
  Description of Artificial Sequence: Synthetic oligonucleotide
cagcuggugacacagcuua

SEQ ID NO: 2782 - RNA, 19 nt, Artificial Sequence
  Description of Artificial Sequence: Synthetic oligonucleotide
caugccagccuugccccau

SEQ ID NO: 2783 - RNA, 19 nt, Artificial Sequence
  Description of Artificial Sequence: Synthetic oligonucleotide
ccaaccaugucaaaauuac

SEQ ID NO: 2784 - RNA, 19 nt, Artificial Sequence
  Description of Artificial Sequence: Synthetic oligonucleotide
cccaaccaugucaaaauua

SEQ ID NO: 2785 - RNA, 19 nt, Artificial Sequence
  Description of Artificial Sequence: Synthetic oligonucleotide
cgguacagugaggacccca

SEQ ID NO: 2786 - RNA, 19 nt, Artificial Sequence
  Description of Artificial Sequence: Synthetic oligonucleotide
cuggugacacagcuuaugc

SEQ ID NO: 2787 - RNA, 19 nt, Artificial Sequence
  Description of Artificial Sequence: Synthetic oligonucleotide
gaggagggcugcuugagga

SEQ ID NO: 2788 - RNA, 19 nt, Artificial Sequence
  Description of Artificial Sequence: Synthetic oligonucleotide
gcaugccagccuugcccca

SEQ ID NO: 2789 - RNA, 19 nt, Artificial Sequence
  Description of Artificial Sequence: Synthetic oligonucleotide
gccagccuugccccaucaa

SEQ ID NO: 2790 - RNA, 19 nt, Artificial Sequence
  Description of Artificial Sequence: Synthetic oligonucleotide
gcgguacagugaggacccc

SEQ ID NO: 2791 - RNA, 19 nt, Artificial Sequence
  Description of Artificial Sequence: Synthetic oligonucleotide
gcuggugacacagcuuaug

SEQ ID NO: 2792 - RNA, 19 nt, Artificial Sequence
  Description of Artificial Sequence: Synthetic oligonucleotide
ggagggcugcuugaggaag

SEQ ID NO: 2793 - RNA, 19 nt, Artificial Sequence
  Description of Artificial Sequence: Synthetic oligonucleotide
ggugacacagcuuaugccc

SEQ ID NO: 2794 - RNA, 19 nt, Artificial Sequence
  Description of Artificial Sequence: Synthetic oligonucleotide
guacagugaggaccccaca

SEQ ID NO: 2795 - RNA, 19 nt, Artificial Sequence
  Description of Artificial Sequence: Synthetic oligonucleotide
gucccaaccaugucaaaau

SEQ ID NO: 2796 - RNA, 19 nt, Artificial Sequence
  Description of Artificial Sequence: Synthetic oligonucleotide
uacagugaggaccccacag

SEQ ID NO: 2797 - RNA, 19 nt, Artificial Sequence
  Description of Artificial Sequence: Synthetic oligonucleotide
uacuuuuuuuguuuuguuu

SEQ ID NO: 2798 - RNA, 19 nt, Artificial Sequence
  Description of Artificial Sequence: Synthetic oligonucleotide
ucccaaccaugucaaaauu

SEQ ID NO: 2799 - RNA, 19 nt, Artificial Sequence
  Description of Artificial Sequence: Synthetic oligonucleotide
uccuccugccuucagccca

SEQ ID NO: 2800 - RNA, 19 nt, Artificial Sequence
  Description of Artificial Sequence: Synthetic oligonucleotide
uggugacacagcuuaugcc

SEQ ID NO: 2801 - RNA, 19 nt, Artificial Sequence
  Description of Artificial Sequence: Synthetic oligonucleotide
uguuuuguuuuuuuaaaga

SEQ ID NO: 2802 - RNA, 19 nt, Artificial Sequence
  Description of Artificial Sequence: Synthetic oligonucleotide
uuuguuuuuuuaaagauga

SEQ ID NO: 2803 - RNA, 19 nt, Artificial Sequence
  Description of Artificial Sequence: Synthetic oligonucleotide
uuuuguuuuuuuaaagaug

SEQ ID NO: 2804 - RNA, 19 nt, Artificial Sequence
  Description of Artificial Sequence: Synthetic oligonucleotide
uuuuuuuguuuuguuuuuu

SEQ ID NO: 2805 - RNA, 19 nt, Artificial Sequence
  Description of Artificial Sequence: Synthetic oligonucleotide
aaaaaaauaaaauaaaaua

SEQ ID NO: 2806 - RNA, 19 nt, Artificial Sequence
  Description of Artificial Sequence: Synthetic oligonucleotide
aaaaaauaaaauaaaauaa

SEQ ID NO: 2807 - RNA, 19 nt, Artificial Sequence
  Description of Artificial Sequence: Synthetic oligonucleotide
aaaaauaaaauaaaauaaa

SEQ ID NO: 2808 - RNA, 19 nt, Artificial Sequence
  Description of Artificial Sequence: Synthetic oligonucleotide
aaaauaaaauaaaauaaaa

SEQ ID NO: 2809 - RNA, 19 nt, Artificial Sequence
  Description of Artificial Sequence: Synthetic oligonucleotide
aaauaaaauaaaauaaaaa

SEQ ID NO: 2810 - RNA, 19 nt, Artificial Sequence
  Description of Artificial Sequence: Synthetic oligonucleotide
aagcuuaaagugcuuggcu

SEQ ID NO: 2811 - RNA, 19 nt, Artificial Sequence
  Description of Artificial Sequence: Synthetic oligonucleotide
aagugcuuggcucgggugu

SEQ ID NO: 2812 - RNA, 19 nt, Artificial Sequence
  Description of Artificial Sequence: Synthetic oligonucleotide
aauaaaauaaaauaaaaaa

SEQ ID NO: 2813 - RNA, 19 nt, Artificial Sequence
  Description of Artificial Sequence: Synthetic oligonucleotide
acaaaaaaauaaaauaaaa

SEQ ID NO: 2814 - RNA, 19 nt, Artificial Sequence
  Description of Artificial Sequence: Synthetic oligonucleotide
accaggauggcccgagacc

SEQ ID NO: 2815 - RNA, 19 nt, Artificial Sequence
  Description of Artificial Sequence: Synthetic oligonucleotide
agcuuaaagugcuuggcuc

SEQ ID NO: 2816 - RNA, 19 nt, Artificial Sequence
  Description of Artificial Sequence: Synthetic oligonucleotide
aggauggcccgagacccac

SEQ ID NO: 2817 - RNA, 19 nt, Artificial Sequence
  Description of Artificial Sequence: Synthetic oligonucleotide
caaggggcgaugcuggggu

SEQ ID NO: 2818 - RNA, 19 nt, Artificial Sequence
  Description of Artificial Sequence: Synthetic oligonucleotide
caccaggauggcccgagac

SEQ ID NO: 2819 - RNA, 19 nt, Artificial Sequence
  Description of Artificial Sequence: Synthetic oligonucleotide
cauggugauggucaagugu

SEQ ID NO: 2820 - RNA, 19 nt, Artificial Sequence
  Description of Artificial Sequence: Synthetic oligonucleotide
cgucgccgcagcagccacc

SEQ ID NO: 2821 - RNA, 19 nt, Artificial Sequence
  Description of Artificial Sequence: Synthetic oligonucleotide
cugccagacauugaccaag

SEQ ID NO: 2822 - RNA, 19 nt, Artificial Sequence
  Description of Artificial Sequence: Synthetic oligonucleotide
cugggggaugcuggggccc

SEQ ID NO: 2823 - RNA, 19 nt, Artificial Sequence
  Description of Artificial Sequence: Synthetic oligonucleotide
gacugccagacauugacca

SEQ ID NO: 2824 - RNA, 19 nt, Artificial Sequence
  Description of Artificial Sequence: Synthetic oligonucleotide
gauggaggugguccugggg

SEQ ID NO: 2825 - RNA, 19 nt, Artificial Sequence
  Description of Artificial Sequence: Synthetic oligonucleotide
ggguccuggaucagaagac

SEQ ID NO: 2826 - RNA, 19 nt, Artificial Sequence
  Description of Artificial Sequence: Synthetic oligonucleotide
gguccuggaucagaagacu

SEQ ID NO: 2827 - RNA, 19 nt, Artificial Sequence
  Description of Artificial Sequence: Synthetic oligonucleotide
ggugauggucaaguguugg

SEQ ID NO: 2828 - RNA, 19 nt, Artificial Sequence
  Description of Artificial Sequence: Synthetic oligonucleotide
guacgggagaucacagguu

SEQ ID NO: 2829 - RNA, 19 nt, Artificial Sequence
  Description of Artificial Sequence: Synthetic oligonucleotide
gugagguggugauggggaa

SEQ ID NO: 2830 - RNA, 19 nt, Artificial Sequence
  Description of Artificial Sequence: Synthetic oligonucleotide
uaaaaauacaaaaaaauaa

SEQ ID NO: 2831 - RNA, 19 nt, Artificial Sequence
  Description of Artificial Sequence: Synthetic oligonucleotide
uaaagugcuuggcucgggu

SEQ ID NO: 2832 - RNA, 19 nt, Artificial Sequence
  Description of Artificial Sequence: Synthetic oligonucleotide
uacaaaaaaauaaaauaaa

SEQ ID NO: 2833 - RNA, 19 nt, Artificial Sequence
  Description of Artificial Sequence: Synthetic oligonucleotide
ucaccaggauggcccgaga

SEQ ID NO: 2834 - RNA, 19 nt, Artificial Sequence
  Description of Artificial Sequence: Synthetic oligonucleotide
ugccagacauugaccaaga

SEQ ID NO: 2835 - RNA, 19 nt, Artificial Sequence
  Description of Artificial Sequence: Synthetic oligonucleotide
ugugagguggugaugggga

SEQ ID NO: 2836 - RNA, 19 nt, Artificial Sequence
  Description of Artificial Sequence: Synthetic oligonucleotide
uguggaucccugaggguga

SEQ ID NO: 2837 - RNA, 19 nt, Artificial Sequence
  Description of Artificial Sequence: Synthetic oligonucleotide
uuaaagugcuuggcucggg

SEQ ID NO: 2838 - RNA, 19 nt, Artificial Sequence
  Description of Artificial Sequence: Synthetic oligonucleotide
uucaccaggauggcccgag

SEQ ID NO: 2839 - RNA, 19 nt, Artificial Sequence
  Description of Artificial Sequence: Synthetic oligonucleotide
aagaugaggaguaugaaua

SEQ ID NO: 2840 - RNA, 19 nt, Artificial Sequence
  Description of Artificial Sequence: Synthetic oligonucleotide
aagggggagcgguuggcac

SEQ ID NO: 2841 - RNA, 19 nt, Artificial Sequence
  Description of Artificial Sequence: Synthetic oligonucleotide
aaguggauggcccuugaga

SEQ ID NO: 2842 - RNA, 19 nt, Artificial Sequence
  Description of Artificial Sequence: Synthetic oligonucleotide
aauugaugucuacauggug

SEQ ID NO: 2843 - RNA, 19 nt, Artificial Sequence
  Description of Artificial Sequence: Synthetic oligonucleotide
agaagggggagcgguuggc

SEQ ID NO: 2844 - RNA, 19 nt, Artificial Sequence
  Description of Artificial Sequence: Synthetic oligonucleotide
agaucugcacaauugaugu

SEQ ID NO: 2845 - RNA, 19 nt, Artificial Sequence
  Description of Artificial Sequence: Synthetic oligonucleotide
agaugaggaguaugaauac

SEQ ID NO: 2846 - RNA, 19 nt, Artificial Sequence
  Description of Artificial Sequence: Synthetic oligonucleotide
agccccagaucugcacaau

SEQ ID NO: 2847 - RNA, 19 nt, Artificial Sequence
  Description of Artificial Sequence: Synthetic oligonucleotide
agcucugcuaccaccacuc

SEQ ID NO: 2848 - RNA, 19 nt, Artificial Sequence
  Description of Artificial Sequence: Synthetic oligonucleotide
agggggagcgguuggcaca

SEQ ID NO: 2849 - RNA, 19 nt, Artificial Sequence
  Description of Artificial Sequence: Synthetic oligonucleotide
agguggugauggggaaccu

SEQ ID NO: 2850 - RNA, 19 nt, Artificial Sequence
  Description of Artificial Sequence: Synthetic oligonucleotide
agugcugccaugaugagug

SEQ ID NO: 2851 - RNA, 19 nt, Artificial Sequence
  Description of Artificial Sequence: Synthetic oligonucleotide
cacagccccagaucugcac

SEQ ID NO: 2852 - RNA, 19 nt, Artificial Sequence
  Description of Artificial Sequence: Synthetic oligonucleotide
cagaucugcacaauugaug

SEQ ID NO: 2853 - RNA, 19 nt, Artificial Sequence
  Description of Artificial Sequence: Synthetic oligonucleotide
cagccccagaucugcacaa

SEQ ID NO: 2854 - RNA, 19 nt, Artificial Sequence
  Description of Artificial Sequence: Synthetic oligonucleotide
cagcucugcuaccaccacu

SEQ ID NO: 2855 - RNA, 19 nt, Artificial Sequence
  Description of Artificial Sequence: Synthetic oligonucleotide
ccaauuaaguggauggccc

SEQ ID NO: 2856 - RNA, 19 nt, Artificial Sequence
  Description of Artificial Sequence: Synthetic oligonucleotide
ccagaucugcacaauugau

SEQ ID NO: 2857 - RNA, 19 nt, Artificial Sequence
  Description of Artificial Sequence: Synthetic oligonucleotide
cccagaucugcacaauuga

SEQ ID NO: 2858 - RNA, 19 nt, Artificial Sequence
  Description of Artificial Sequence: Synthetic oligonucleotide
ccccagaucugcacaauug

SEQ ID NO: 2859 - RNA, 19 nt, Artificial Sequence
  Description of Artificial Sequence: Synthetic oligonucleotide
ccuuuuaaguccaucaucu

SEQ ID NO: 2860 - RNA, 19 nt, Artificial Sequence
  Description of Artificial Sequence: Synthetic oligonucleotide
cgggagaucacagguuacc

SEQ ID NO: 2861 - RNA, 19 nt, Artificial Sequence
  Description of Artificial Sequence: Synthetic oligonucleotide
gaagaugaggaguaugaau

SEQ ID NO: 2862 - RNA, 19 nt, Artificial Sequence
  Description of Artificial Sequence: Synthetic oligonucleotide
gagaagggggagcgguugg

SEQ ID NO: 2863 - RNA, 19 nt, Artificial Sequence
  Description of Artificial Sequence: Synthetic oligonucleotide
gagcgguuggcacagcccc

SEQ ID NO: 2864 - RNA, 19 nt, Artificial Sequence
  Description of Artificial Sequence: Synthetic oligonucleotide
gcagcucugcuaccaccac

SEQ ID NO: 2865 - RNA, 19 nt, Artificial Sequence
  Description of Artificial Sequence: Synthetic oligonucleotide
gccccagaucugcacaauu

SEQ ID NO: 2866 - RNA, 19 nt, Artificial Sequence
  Description of Artificial Sequence: Synthetic oligonucleotide
ggagcgguuggcacagccc

SEQ ID NO: 2867 - RNA, 19 nt, Artificial Sequence
  Description of Artificial Sequence: Synthetic oligonucleotide
ggcgaugcugggguccugg

SEQ ID NO: 2868 - RNA, 19 nt, Artificial Sequence
  Description of Artificial Sequence: Synthetic oligonucleotide
gggagcgguuggcacagcc

SEQ ID NO: 2869 - RNA, 19 nt, Artificial Sequence
  Description of Artificial Sequence: Synthetic oligonucleotide
gggcgaugcugggguccug

SEQ ID NO: 2870 - RNA, 19 nt, Artificial Sequence
  Description of Artificial Sequence: Synthetic oligonucleotide
ggggagcgguuggcacagc

SEQ ID NO: 2871 - RNA, 19 nt, Artificial Sequence
  Description of Artificial Sequence: Synthetic oligonucleotide
gggggagcgguuggcacag

SEQ ID NO: 2872 - RNA, 19 nt, Artificial Sequence
  Description of Artificial Sequence: Synthetic oligonucleotide
ggugcgagggacccagguc

SEQ ID NO: 2873 - RNA, 19 nt, Artificial Sequence
  Description of Artificial Sequence: Synthetic oligonucleotide
gugcugccaugaugagugu

SEQ ID NO: 2874 - RNA, 19 nt, Artificial Sequence
  Description of Artificial Sequence: Synthetic oligonucleotide
ugcgagggacccaggucua

SEQ ID NO: 2875 - RNA, 19 nt, Artificial Sequence
  Description of Artificial Sequence: Synthetic oligonucleotide
uggugcgagggacccaggu

SEQ ID NO: 2876 - RNA, 19 nt, Artificial Sequence
  Description of Artificial Sequence: Synthetic oligonucleotide
uuaaguggauggcccuuga

SEQ ID NO: 2877 - RNA, 19 nt, Artificial Sequence
  Description of Artificial Sequence: Synthetic oligonucleotide
uugccugccggcacuucaa

SEQ ID NO: 2878 - RNA, 19 nt, Artificial Sequence
  Description of Artificial Sequence: Synthetic oligonucleotide
aacauccaguccuggccgc

SEQ ID NO: 2879 - RNA, 19 nt, Artificial Sequence
  Description of Artificial Sequence: Synthetic oligonucleotide
acaaccggggcuucucauu

SEQ ID NO: 2880 - RNA, 19 nt, Artificial Sequence
  Description of Artificial Sequence: Synthetic oligonucleotide
acaguggagccuguguacc

SEQ ID NO: 2881 - RNA, 19 nt, Artificial Sequence
  Description of Artificial Sequence: Synthetic oligonucleotide
acccagagaagcucaaugu

SEQ ID NO: 2882 - RNA, 19 nt, Artificial Sequence
  Description of Artificial Sequence: Synthetic oligonucleotide
accugaacauccaguccug

SEQ ID NO: 2883 - RNA, 19 nt, Artificial Sequence
  Description of Artificial Sequence: Synthetic oligonucleotide
acugcuuugccugccggca

SEQ ID NO: 2884 - RNA, 19 nt, Artificial Sequence
  Description of Artificial Sequence: Synthetic oligonucleotide
agaagugacaggcuauguc

SEQ ID NO: 2885 - RNA, 19 nt, Artificial Sequence
  Description of Artificial Sequence: Synthetic oligonucleotide
agaugggccccacugugug

SEQ ID NO: 2886 - RNA, 19 nt, Artificial Sequence
  Description of Artificial Sequence: Synthetic oligonucleotide
agcuguccccauaacuuug

SEQ ID NO: 2887 - RNA, 19 nt, Artificial Sequence
  Description of Artificial Sequence: Synthetic oligonucleotide
cacccagggguguaaagga

SEQ ID NO: 2888 - RNA, 19 nt, Artificial Sequence
  Description of Artificial Sequence: Synthetic oligonucleotide
ccagagaagcucaaugucu

SEQ ID NO: 2889 - RNA, 19 nt, Artificial Sequence
  Description of Artificial Sequence: Synthetic oligonucleotide
cccagggguguaaaggacc

SEQ ID NO: 2890 - RNA, 19 nt, Artificial Sequence
  Description of Artificial Sequence: Synthetic oligonucleotide
ccuuugauaacccugauua

SEQ ID NO: 2891 - RNA, 19 nt, Artificial Sequence
  Description of Artificial Sequence: Synthetic oligonucleotide
cgagauggaggugguccug

SEQ ID NO: 2892 - RNA, 19 nt, Artificial Sequence
  Description of Artificial Sequence: Synthetic oligonucleotide
cugaaggaaauuagugcug

SEQ ID NO: 2893 - RNA, 19 nt, Artificial Sequence
  Description of Artificial Sequence: Synthetic oligonucleotide
gaacauccaguccuggccg

SEQ ID NO: 2894 - RNA, 19 nt, Artificial Sequence
  Description of Artificial Sequence: Synthetic oligonucleotide
gacaguggagccuguguac

SEQ ID NO: 2895 - RNA, 19 nt, Artificial Sequence
  Description of Artificial Sequence: Synthetic oligonucleotide
gacugcuuugccugccggc

SEQ ID NO: 2896 - RNA, 19 nt, Artificial Sequence
  Description of Artificial Sequence: Synthetic oligonucleotide
gauaacccugauuacuggc

SEQ ID NO: 2897 - RNA, 19 nt, Artificial Sequence
  Description of Artificial Sequence: Synthetic oligonucleotide
gcuguccccauaacuuugu

SEQ ID NO: 2898 - RNA, 19 nt, Artificial Sequence
  Description of Artificial Sequence: Synthetic oligonucleotide
gggggcugcucaggcccuc

SEQ ID NO: 2899 - RNA, 19 nt, Artificial Sequence
  Description of Artificial Sequence: Synthetic oligonucleotide
guguaauggucacugcuuu

SEQ ID NO: 2900 - RNA, 19 nt, Artificial Sequence
  Description of Artificial Sequence: Synthetic oligonucleotide
uaccugaacauccaguccu

SEQ ID NO: 2901 - RNA, 19 nt, Artificial Sequence
  Description of Artificial Sequence: Synthetic oligonucleotide
uccugggcaaccuggacuu

SEQ ID NO: 2902 - RNA, 19 nt, Artificial Sequence
  Description of Artificial Sequence: Synthetic oligonucleotide
ugaaggaaauuagugcugg

SEQ ID NO: 2903 - RNA, 19 nt, Artificial Sequence
  Description of Artificial Sequence: Synthetic oligonucleotide
ugauggggaaccuugagau

SEQ ID NO: 2904 - RNA, 19 nt, Artificial Sequence
  Description of Artificial Sequence: Synthetic oligonucleotide
uggacccagagaagcucaa

SEQ ID NO: 2905 - RNA, 19 nt, Artificial Sequence
  Description of Artificial Sequence: Synthetic oligonucleotide
aaaacugugagguugucau

SEQ ID NO: 2906 - RNA, 19 nt, Artificial Sequence
  Description of Artificial Sequence: Synthetic oligonucleotide
aaaggagaacguuugccuc

SEQ ID NO: 2907 - RNA, 19 nt, Artificial Sequence
  Description of Artificial Sequence: Synthetic oligonucleotide
aacugugagguugucaugg

SEQ ID NO: 2908 - RNA, 19 nt, Artificial Sequence
  Description of Artificial Sequence: Synthetic oligonucleotide
aaggagaacguuugccuca

SEQ ID NO: 2909 - RNA, 19 nt, Artificial Sequence
  Description of Artificial Sequence: Synthetic oligonucleotide
accggguccugacaacugu

SEQ ID NO: 2910 - RNA, 19 nt, Artificial Sequence
  Description of Artificial Sequence: Synthetic oligonucleotide
accuaguuauucaggguga

SEQ ID NO: 2911 - RNA, 19 nt, Artificial Sequence
  Description of Artificial Sequence: Synthetic oligonucleotide
acgucagugacugcugcca

SEQ ID NO: 2912 - RNA, 19 nt, Artificial Sequence
  Description of Artificial Sequence: Synthetic oligonucleotide
acugugagguugucauggg

SEQ ID NO: 2913 - RNA, 19 nt, Artificial Sequence
  Description of Artificial Sequence: Synthetic oligonucleotide
agaaaggagaacguuugcc

SEQ ID NO: 2914 - RNA, 19 nt, Artificial Sequence
  Description of Artificial Sequence: Synthetic oligonucleotide
aggagaacguuugccucag

SEQ ID NO: 2915 - RNA, 19 nt, Artificial Sequence
  Description of Artificial Sequence: Synthetic oligonucleotide
auuuuggagaaggaaaaaa

SEQ ID NO: 2916 - RNA, 19 nt, Artificial Sequence
  Description of Artificial Sequence: Synthetic oligonucleotide
cacccagacuaccugcagg

SEQ ID NO: 2917 - RNA, 19 nt, Artificial Sequence
  Description of Artificial Sequence: Synthetic oligonucleotide
cauuuccagauuuuuuagu

SEQ ID NO: 2918 - RNA, 19 nt, Artificial Sequence
  Description of Artificial Sequence: Synthetic oligonucleotide
ccagacuaccugcaggagu

SEQ ID NO: 2919 - RNA, 19 nt, Artificial Sequence
  Description of Artificial Sequence: Synthetic oligonucleotide
cccagacuaccugcaggag

SEQ ID NO: 2920 - RNA, 19 nt, Artificial Sequence
  Description of Artificial Sequence: Synthetic oligonucleotide
ccggguccugacaacugua

SEQ ID NO: 2921 - RNA, 19 nt, Artificial Sequence
  Description of Artificial Sequence: Synthetic oligonucleotide
ccuaguuauucagggugau

SEQ ID NO: 2922 - RNA, 19 nt, Artificial Sequence
  Description of Artificial Sequence: Synthetic oligonucleotide
cgucagugacugcugccau

SEQ ID NO: 2923 - RNA, 19 nt, Artificial Sequence
  Description of Artificial Sequence: Synthetic oligonucleotide
cuaguuauucagggugaug

SEQ ID NO: 2924 - RNA, 19 nt, Artificial Sequence
  Description of Artificial Sequence: Synthetic oligonucleotide
cugccuguuggaguauguc

SEQ ID NO: 2925 - RNA, 19 nt, Artificial Sequence
  Description of Artificial Sequence: Synthetic oligonucleotide
cugguguguccagauagcu

SEQ ID NO: 2926 - RNA, 19 nt, Artificial Sequence
  Description of Artificial Sequence: Synthetic oligonucleotide
gaaaggagaacguuugccu

SEQ ID NO: 2927 - RNA, 19 nt, Artificial Sequence
  Description of Artificial Sequence: Synthetic oligonucleotide
gaccggguccugacaacug

SEQ ID NO: 2928 - RNA, 19 nt, Artificial Sequence
  Description of Artificial Sequence: Synthetic oligonucleotide
gagaaaggagaacguuugc

SEQ ID NO: 2929 - RNA, 19 nt, Artificial Sequence
  Description of Artificial Sequence: Synthetic oligonucleotide
gagaacguuugccucagcc

SEQ ID NO: 2930 - RNA, 19 nt, Artificial Sequence
  Description of Artificial Sequence: Synthetic oligonucleotide
gagaaggaaaaaaugaaua

SEQ ID NO: 2931 - RNA, 19 nt, Artificial Sequence
  Description of Artificial Sequence: Synthetic oligonucleotide
gauaccuaguuauucaggg

SEQ ID NO: 2932 - RNA, 19 nt, Artificial Sequence
  Description of Artificial Sequence: Synthetic oligonucleotide
gcugccuguuggaguaugu

SEQ ID NO: 2933 - RNA, 19 nt, Artificial Sequence
  Description of Artificial Sequence: Synthetic oligonucleotide
gcugcuuaacugguguguc

SEQ ID NO: 2934 - RNA, 19 nt, Artificial Sequence
  Description of Artificial Sequence: Synthetic oligonucleotide
gcuuccucuggaaaauacu

SEQ ID NO: 2935 - RNA, 19 nt, Artificial Sequence
  Description of Artificial Sequence: Synthetic oligonucleotide
ggaccggguccugacaacu

SEQ ID NO: 2936 - RNA, 19 nt, Artificial Sequence
  Description of Artificial Sequence: Synthetic oligonucleotide
ggagaacguuugccucagc

SEQ ID NO: 2937 - RNA, 19 nt, Artificial Sequence
  Description of Artificial Sequence: Synthetic oligonucleotide
ggcugccuguuggaguaug

SEQ ID NO: 2938 - RNA, 19 nt, Artificial Sequence
  Description of Artificial Sequence: Synthetic oligonucleotide
gguguguccagauagcuaa

SEQ ID NO: 2939 - RNA, 19 nt, Artificial Sequence
  Description of Artificial Sequence: Synthetic oligonucleotide
guguccagauagcuaaggg

SEQ ID NO: 2940 - RNA, 19 nt, Artificial Sequence
  Description of Artificial Sequence: Synthetic oligonucleotide
guguguccagauagcuaag

SEQ ID NO: 2941 - RNA, 19 nt, Artificial Sequence
  Description of Artificial Sequence: Synthetic oligonucleotide
uaacugguguguccagaua

SEQ ID NO: 2942 - RNA, 19 nt, Artificial Sequence
  Description of Artificial Sequence: Synthetic oligonucleotide
uaccuaguuauucagggug

SEQ ID NO: 2943 - RNA, 19 nt, Artificial Sequence
  Description of Artificial Sequence: Synthetic oligonucleotide
uacgucagugacugcugcc

SEQ ID NO: 2944 - RNA, 19 nt, Artificial Sequence
  Description of Artificial Sequence: Synthetic oligonucleotide
uaguuauucagggugauga

SEQ ID NO: 2945 - RNA, 19 nt, Artificial Sequence
  Description of Artificial Sequence: Synthetic oligonucleotide
ucauuuccagauuuuuuag

SEQ ID NO: 2946 - RNA, 19 nt, Artificial Sequence
  Description of Artificial Sequence: Synthetic oligonucleotide
ugaugaccuuuggaggaaa

SEQ ID NO: 2947 - RNA, 19 nt, Artificial Sequence
  Description of Artificial Sequence: Synthetic oligonucleotide
ugccuguuggaguaugucc

SEQ ID NO: 2948 - RNA, 19 nt, Artificial Sequence
  Description of Artificial Sequence: Synthetic oligonucleotide
ugcugcuuaacuggugugu

SEQ ID NO: 2949 - RNA, 19 nt, Artificial Sequence
  Description of Artificial Sequence: Synthetic oligonucleotide
uggaugaagaggauuugga

SEQ ID NO: 2950 - RNA, 19 nt, Artificial Sequence
  Description of Artificial Sequence: Synthetic oligonucleotide
ugguguguccagauagcua

SEQ ID NO: 2951 - RNA, 19 nt, Artificial Sequence
  Description of Artificial Sequence: Synthetic oligonucleotide
uguguccagauagcuaagg

SEQ ID NO: 2952 - RNA, 19 nt, Artificial Sequence
  Description of Artificial Sequence: Synthetic oligonucleotide
aaagaguacaaugcugaug

SEQ ID NO: 2953 - RNA, 19 nt, Artificial Sequence
  Description of Artificial Sequence: Synthetic oligonucleotide
aagaguacaaugcugaugg

SEQ ID NO: 2954 - RNA, 19 nt, Artificial Sequence
  Description of Artificial Sequence: Synthetic oligonucleotide
aaggacagccuugccccau

SEQ ID NO: 2955 - RNA, 19 nt, Artificial Sequence
  Description of Artificial Sequence: Synthetic oligonucleotide
acagugcugaccccaccgu

SEQ ID NO: 2956 - RNA, 19 nt, Artificial Sequence
  Description of Artificial Sequence: Synthetic oligonucleotide
acugugaagauuccugugg

SEQ ID NO: 2957 - RNA, 19 nt, Artificial Sequence
  Description of Artificial Sequence: Synthetic oligonucleotide
acugugcugccgccuccac

SEQ ID NO: 2958 - RNA, 19 nt, Artificial Sequence
  Description of Artificial Sequence: Synthetic oligonucleotide
agagguacagugcugaccc

SEQ ID NO: 2959 - RNA, 19 nt, Artificial Sequence
  Description of Artificial Sequence: Synthetic oligonucleotide
agcccuccuccugccuaca

SEQ ID NO: 2960 - RNA, 19 nt, Artificial Sequence
  Description of Artificial Sequence: Synthetic oligonucleotide
aggacagccuugccccaug

SEQ ID NO: 2961 - RNA, 19 nt, Artificial Sequence
  Description of Artificial Sequence: Synthetic oligonucleotide
agguacagugcugacccca

SEQ ID NO: 2962 - RNA, 19 nt, Artificial Sequence
  Description of Artificial Sequence: Synthetic oligonucleotide
cacagcccuccuccugccu

SEQ ID NO: 2963 - RNA, 19 nt, Artificial Sequence
  Description of Artificial Sequence: Synthetic oligonucleotide
cacugugcugccgccucca

SEQ ID NO: 2964 - RNA, 19 nt, Artificial Sequence
  Description of Artificial Sequence: Synthetic oligonucleotide
cagagguacagugcugacc

SEQ ID NO: 2965 - RNA, 19 nt, Artificial Sequence
  Description of Artificial Sequence: Synthetic oligonucleotide
cagcccuccuccugccuac

SEQ ID NO: 2966 - RNA, 19 nt, Artificial Sequence
  Description of Artificial Sequence: Synthetic oligonucleotide
cuccaaaccaugugaaaau

SEQ ID NO: 2967 - RNA, 19 nt, Artificial Sequence
  Description of Artificial Sequence: Synthetic oligonucleotide
cugugaagauuccuguggc

SEQ ID NO: 2968 - RNA, 19 nt, Artificial Sequence
  Description of Artificial Sequence: Synthetic oligonucleotide
gaaggacagccuugcccca

SEQ ID NO: 2969 - RNA, 19 nt, Artificial Sequence
  Description of Artificial Sequence: Synthetic oligonucleotide
gacagccuugccccaugua

SEQ ID NO: 2970 - RNA, 19 nt, Artificial Sequence
  Description of Artificial Sequence: Synthetic oligonucleotide
gagguacagugcugacccc

SEQ ID NO: 2971 - RNA, 19 nt, Artificial Sequence
  Description of Artificial Sequence: Synthetic oligonucleotide
gcacugugcugccgccucc

SEQ ID NO: 2972 - RNA, 19 nt, Artificial Sequence
  Description of Artificial Sequence: Synthetic oligonucleotide
gcccuccuccugccuacac

SEQ ID NO: 2973 - RNA, 19 nt, Artificial Sequence
  Description of Artificial Sequence: Synthetic oligonucleotide
ggauggcucuggaguguau

SEQ ID NO: 2974 - RNA, 19 nt, Artificial Sequence
  Description of Artificial Sequence: Synthetic oligonucleotide
guacagugcugaccccacc

SEQ ID NO: 2975 - RNA, 19 nt, Artificial Sequence
  Description of Artificial Sequence: Synthetic oligonucleotide
gugaagauuccuguggcua

SEQ ID NO: 2976 - RNA, 19 nt, Artificial Sequence
  Description of Artificial Sequence: Synthetic oligonucleotide
uacagugcugaccccaccg

SEQ ID NO: 2977 - RNA, 19 nt, Artificial Sequence
  Description of Artificial Sequence: Synthetic oligonucleotide
ucagccucccaucugcacu

SEQ ID NO: 2978 - RNA, 19 nt, Artificial Sequence
  Description of Artificial Sequence: Synthetic oligonucleotide
ugaagauuccuguggcuau

SEQ ID NO: 2979 - RNA, 19 nt, Artificial Sequence
  Description of Artificial Sequence: Synthetic oligonucleotide
ugaguaugugaaugagcca

SEQ ID NO: 2980 - RNA, 19 nt, Artificial Sequence
  Description of Artificial Sequence: Synthetic oligonucleotide
uggauggcucuggagugua

SEQ ID NO: 2981 - RNA, 19 nt, Artificial Sequence
  Description of Artificial Sequence: Synthetic oligonucleotide
ugugaagauuccuguggcu

SEQ ID NO: 2982 - RNA, 19 nt, Artificial Sequence
  Description of Artificial Sequence: Synthetic oligonucleotide
uucaagaugaaguaaagaa

SEQ ID NO: 2983 - RNA, 19 nt, Artificial Sequence
  Description of Artificial Sequence: Synthetic oligonucleotide
uugccucagccucccaucu

SEQ ID NO: 2984 - RNA, 19 nt, Artificial Sequence
  Description of Artificial Sequence: Synthetic oligonucleotide
uuggaugauugaugcugac

SEQ ID NO: 2985 - RNA, 19 nt, Artificial Sequence
  Description of Artificial Sequence: Synthetic oligonucleotide
aaauucacccaucagagug

SEQ ID NO: 2986 - RNA, 19 nt, Artificial Sequence
  Description of Artificial Sequence: Synthetic oligonucleotide
aacagguuuccugaacaua

SEQ ID NO: 2987 - RNA, 19 nt, Artificial Sequence
  Description of Artificial Sequence: Synthetic oligonucleotide
aaggauggcucgagacccu

SEQ ID NO: 2988 - RNA, 19 nt, Artificial Sequence
  Description of Artificial Sequence: Synthetic oligonucleotide
aaguagaagaaaaugggau

SEQ ID NO: 2989 - RNA, 19 nt, Artificial Sequence
  Description of Artificial Sequence: Synthetic oligonucleotide
acaguggagcauguguuac

SEQ ID NO: 2990 - RNA, 19 nt, Artificial Sequence
  Description of Artificial Sequence: Synthetic oligonucleotide
acugcuuugccugcaugaa

SEQ ID NO: 2991 - RNA, 19 nt, Artificial Sequence
  Description of Artificial Sequence: Synthetic oligonucleotide
acuguggauuccaguaaca

SEQ ID NO: 2992 - RNA, 19 nt, Artificial Sequence
  Description of Artificial Sequence: Synthetic oligonucleotide
agacuguggauuccaguaa

SEQ ID NO: 2993 - RNA, 19 nt, Artificial Sequence
  Description of Artificial Sequence: Synthetic oligonucleotide
agauggcccaaacugugug

SEQ ID NO: 2994 - RNA, 19 nt, Artificial Sequence
  Description of Artificial Sequence: Synthetic oligonucleotide
agguugucaugggcaaccu

SEQ ID NO: 2995 - RNA, 19 nt, Artificial Sequence
  Description of Artificial Sequence: Synthetic oligonucleotide
aguggagcauguguuacuc

SEQ ID NO: 2996 - RNA, 19 nt, Artificial Sequence
  Description of Artificial Sequence: Synthetic oligonucleotide
auucucagucagugugugc

SEQ ID NO: 2997 - RNA, 19 nt, Artificial Sequence
  Description of Artificial Sequence: Synthetic oligonucleotide
cagacuguggauuccagua

SEQ ID NO: 2998 - RNA, 19 nt, Artificial Sequence
  Description of Artificial Sequence: Synthetic oligonucleotide
caguggagcauguguuacu

SEQ ID NO: 2999 - RNA, 19 nt, Artificial Sequence
  Description of Artificial Sequence: Synthetic oligonucleotide
ccaagauggaaguagaaga

SEQ ID NO: 3000 - RNA, 19 nt, Artificial Sequence
  Description of Artificial Sequence: Synthetic oligonucleotide
ccucuccuuccugcggucu

SEQ ID NO: 3001 - RNA, 19 nt, Artificial Sequence
  Description of Artificial Sequence: Synthetic oligonucleotide
cgagauggagguuuugcug

SEQ ID NO: 3002 - RNA, 19 nt, Artificial Sequence
  Description of Artificial Sequence: Synthetic oligonucleotide
cgauucucagucagugugu

SEQ ID NO: 3003 - RNA, 19 nt, Artificial Sequence
  Description of Artificial Sequence: Synthetic oligonucleotide
cgggaccucuccuuccugc

SEQ ID NO: 3004 - RNA, 19 nt, Artificial Sequence
  Description of Artificial Sequence: Synthetic oligonucleotide
cucagucagugugugcagg

SEQ ID NO: 3005 - RNA, 19 nt, Artificial Sequence
  Description of Artificial Sequence: Synthetic oligonucleotide
cugacuucaguguuuuuuc

SEQ ID NO: 3006 - RNA, 19 nt, Artificial Sequence
  Description of Artificial Sequence: Synthetic oligonucleotide
cugcugcuuaacuggugug

SEQ ID NO: 3007 - RNA, 19 nt, Artificial Sequence
  Description of Artificial Sequence: Synthetic oligonucleotide
cuguggauuccaguaacau

SEQ ID NO: 3008 - RNA, 19 nt, Artificial Sequence
  Description of Artificial Sequence: Synthetic oligonucleotide
gaaauucacccaucagagu

SEQ ID NO: 3009 - RNA, 19 nt, Artificial Sequence
  Description of Artificial Sequence: Synthetic oligonucleotide
gaaguagaagaaaauggga

SEQ ID NO: 3010 - RNA, 19 nt, Artificial Sequence
  Description of Artificial Sequence: Synthetic oligonucleotide
gacaguggagcauguguua

SEQ ID NO: 3011 - RNA, 19 nt, Artificial Sequence
  Description of Artificial Sequence: Synthetic oligonucleotide
gacugcuuugccugcauga

SEQ ID NO: 3012 - RNA, 19 nt, Artificial Sequence
  Description of Artificial Sequence: Synthetic oligonucleotide
gacuguggauuccaguaac

SEQ ID NO: 3013 - RNA, 19 nt, Artificial Sequence
  Description of Artificial Sequence: Synthetic oligonucleotide
gagguugucaugggcaacc

SEQ ID NO: 3014 - RNA, 19 nt, Artificial Sequence
  Description of Artificial Sequence: Synthetic oligonucleotide
gauggcucgagacccucaa

SEQ ID NO: 3015 - RNA, 19 nt, Artificial Sequence
  Description of Artificial Sequence: Synthetic oligonucleotide
gccagacuuugacaaggac

SEQ ID NO: 3016 - RNA, 19 nt, Artificial Sequence
  Description of Artificial Sequence: Synthetic oligonucleotide
gcgauucucagucagugug

SEQ ID NO: 3017 - RNA, 19 nt, Artificial Sequence
  Description of Artificial Sequence: Synthetic oligonucleotide
ggaaauucacccaucagag

SEQ ID NO: 3018 - RNA, 19 nt, Artificial Sequence
  Description of Artificial Sequence: Synthetic oligonucleotide
ggauggcucgagacccuca

SEQ ID NO: 3019 - RNA, 19 nt, Artificial Sequence
  Description of Artificial Sequence: Synthetic oligonucleotide
gggaccucuccuuccugcg

SEQ ID NO: 3020 - RNA, 19 nt, Artificial Sequence
  Description of Artificial Sequence: Synthetic oligonucleotide
gucaugggcaaccuggaga

SEQ ID NO: 3021 - RNA, 19 nt, Artificial Sequence
  Description of Artificial Sequence: Synthetic oligonucleotide
gugagguugucaugggcaa

SEQ ID NO: 3022 - RNA, 19 nt, Artificial Sequence
  Description of Artificial Sequence: Synthetic oligonucleotide
guggauuccaguaacauug

SEQ ID NO: 3023 - RNA, 19 nt, Artificial Sequence
  Description of Artificial Sequence: Synthetic oligonucleotide
guuccaagauggaaguaga

SEQ ID NO: 3024 - RNA, 19 nt, Artificial Sequence
  Description of Artificial Sequence: Synthetic oligonucleotide
guuuggagcuauggaguua

SEQ ID NO: 3025 - RNA, 19 nt, Artificial Sequence
  Description of Artificial Sequence: Synthetic oligonucleotide
ucaaggauggcucgagacc

SEQ ID NO: 3026 - RNA, 19 nt, Artificial Sequence
  Description of Artificial Sequence: Synthetic oligonucleotide
ucaugggcaaccuggagau

SEQ ID NO: 3027 - RNA, 19 nt, Artificial Sequence
  Description of Artificial Sequence: Synthetic oligonucleotide
uccugaacauacagucaug

SEQ ID NO: 3028 - RNA, 19 nt, Artificial Sequence
  Description of Artificial Sequence: Synthetic oligonucleotide
ucucagucagugugugcag

SEQ ID NO: 3029 - RNA, 19 nt, Artificial Sequence
  Description of Artificial Sequence: Synthetic oligonucleotide
ugaauuucaaugacagugg

SEQ ID NO: 3030 - RNA, 19 nt, Artificial Sequence
  Description of Artificial Sequence: Synthetic oligonucleotide
ugacuucaguguuuuuucu

SEQ ID NO: 3031 - RNA, 19 nt, Artificial Sequence
  Description of Artificial Sequence: Synthetic oligonucleotide
ugagguugucaugggcaac

SEQ ID NO: 3032 - RNA, 19 nt, Artificial Sequence
  Description of Artificial Sequence: Synthetic oligonucleotide
ugccagacuuugacaagga

SEQ ID NO: 3033 - RNA, 19 nt, Artificial Sequence
  Description of Artificial Sequence: Synthetic oligonucleotide
uggaugauugaugcugaca

SEQ ID NO: 3034 - RNA, 19 nt, Artificial Sequence
  Description of Artificial Sequence: Synthetic oligonucleotide
uggauuccaguaacauuga

SEQ ID NO: 3035 - RNA, 19 nt, Artificial Sequence
  Description of Artificial Sequence: Synthetic oligonucleotide
ugugagguugucaugggca

SEQ ID NO: 3036 - RNA, 19 nt, Artificial Sequence
  Description of Artificial Sequence: Synthetic oligonucleotide
uguggauuccaguaacauu

SEQ ID NO: 3037 - RNA, 19 nt, Artificial Sequence
  Description of Artificial Sequence: Synthetic oligonucleotide
uguucgagaagucacaggc

SEQ ID NO: 3038 - RNA, 19 nt, Artificial Sequence
  Description of Artificial Sequence: Synthetic oligonucleotide
uuccaagauggaaguagaa

SEQ ID NO: 3039 - RNA, 19 nt, Artificial Sequence
  Description of Artificial Sequence: Synthetic oligonucleotide
uuccugaacauacagucau

SEQ ID NO: 3040 - RNA, 19 nt, Artificial Sequence
  Description of Artificial Sequence: Synthetic oligonucleotide
uucucuuauuccuuuauca

SEQ ID NO: 3041 - RNA, 19 nt, Artificial Sequence
  Description of Artificial Sequence: Synthetic oligonucleotide
uuuccugaacauacaguca

SEQ ID NO: 3042 - RNA, 19 nt, Artificial Sequence
  Description of Artificial Sequence: Synthetic oligonucleotide
uuuggagcuauggaguuac

SEQ ID NO: 3043 - RNA, 19 nt, Artificial Sequence
  Description of Artificial Sequence: Synthetic oligonucleotide
uuuucucacuaugcccucu

SEQ ID NO: 3044 - RNA, 19 nt, Artificial Sequence
  Description of Artificial Sequence: Synthetic oligonucleotide
aacugcacccaggggugua

SEQ ID NO: 3045 - RNA, 19 nt, Artificial Sequence
  Description of Artificial Sequence: Synthetic oligonucleotide
acugcacccagggguguaa

SEQ ID NO: 3046 - RNA, 19 nt, Artificial Sequence
  Description of Artificial Sequence: Synthetic oligonucleotide
caggacacagacugcuuug

SEQ ID NO: 3047 - RNA, 19 nt, Artificial Sequence
  Description of Artificial Sequence: Synthetic oligonucleotide
aaugacaguggagccugug

SEQ ID NO: 3048 - RNA, 19 nt, Artificial Sequence
  Description of Artificial Sequence: Synthetic oligonucleotide
acuucaguguuuuuuccaa

SEQ ID NO: 3049 - RNA, 19 nt, Artificial Sequence
  Description of Artificial Sequence: Synthetic oligonucleotide
ucaggacacagacugcuuu

SEQ ID NO: 3050 - RNA, 19 nt, Artificial Sequence
  Description of Artificial Sequence: Synthetic oligonucleotide
ucaaugacaguggagccug

SEQ ID NO: 3051 - RNA, 19 nt, Artificial Sequence
  Description of Artificial Sequence: Synthetic oligonucleotide
uucaaugacaguggagccu

SEQ ID NO: 3052 - RNA, 19 nt, Artificial Sequence
  Description of Artificial Sequence: Synthetic oligonucleotide
gaacugcacccaggggugu

SEQ ID NO: 3053 - RNA, 19 nt, Artificial Sequence
  Description of Artificial Sequence: Synthetic oligonucleotide
cccugaaggaaauuagugc

SEQ ID NO: 3054 - RNA, 19 nt, Artificial Sequence
  Description of Artificial Sequence: Synthetic oligonucleotide
ugauaacccugauuacugg

SEQ ID NO: 3055 - RNA, 19 nt, Artificial Sequence
  Description of Artificial Sequence: Synthetic oligonucleotide
aguguuggaugauugauga

SEQ ID NO: 3056 - RNA, 19 nt, Artificial Sequence
  Description of Artificial Sequence: Synthetic oligonucleotide
acagcugcugcucaacugg

SEQ ID NO: 3057 - RNA, 19 nt, Artificial Sequence
  Description of Artificial Sequence: Synthetic oligonucleotide
cccauaacuuuguggugga

SEQ ID NO: 3058 - RNA, 19 nt, Artificial Sequence
  Description of Artificial Sequence: Synthetic oligonucleotide
cauaacuuugugguggauc

SEQ ID NO: 3059 - RNA, 19 nt, Artificial Sequence
  Description of Artificial Sequence: Synthetic oligonucleotide
cgagaagugacaggcuaug

SEQ ID NO: 3060 - RNA, 19 nt, Artificial Sequence
  Description of Artificial Sequence: Synthetic oligonucleotide
cugcacccagggguguaaa

SEQ ID NO: 3061 - RNA, 19 nt, Artificial Sequence
  Description of Artificial Sequence: Synthetic oligonucleotide
cuucaguguuuuuuccaau

SEQ ID NO: 3062 - RNA, 19 nt, Artificial Sequence
  Description of Artificial Sequence: Synthetic oligonucleotide
gcacccagggguguaaagg

SEQ ID NO: 3063 - RNA, 19 nt, Artificial Sequence
  Description of Artificial Sequence: Synthetic oligonucleotide
gugccgggggcugcucagg

SEQ ID NO: 3064 - RNA, 19 nt, Artificial Sequence
  Description of Artificial Sequence: Synthetic oligonucleotide
ucgagaagugacaggcuau

SEQ ID NO: 3065 - RNA, 19 nt, Artificial Sequence
  Description of Artificial Sequence: Synthetic oligonucleotide
uuccgaucccugaaggaaa

SEQ ID NO: 3066 - RNA, 19 nt, Artificial Sequence
  Description of Artificial Sequence: Synthetic oligonucleotide
cuuuuuuuuuuuuuuuuuu

SEQ ID NO: 3067 - RNA, 19 nt, Artificial Sequence
  Description of Artificial Sequence: Synthetic oligonucleotide
uuuuuuuuuuuuuuuaaag

SEQ ID NO: 3068 - RNA, 19 nt, Artificial Sequence
  Description of Artificial Sequence: Synthetic oligonucleotide
uuuuuuuuuuuuuuuuaaa

SEQ ID NO: 3069 - RNA, 19 nt, Artificial Sequence
  Description of Artificial Sequence: Synthetic oligonucleotide
uuuuuuuuuuuuuuuuuaa

SEQ ID NO: 3070 - RNA, 19 nt, Artificial Sequence
  Description of Artificial Sequence: Synthetic oligonucleotide
uuuuuuuuuuuuuuuuuua

SEQ ID NO: 3071 - RNA, 19 nt, Artificial Sequence
  Description of Artificial Sequence: Synthetic oligonucleotide
cccucaggacacagacugc

SEQ ID NO: 3072 - RNA, 19 nt, Artificial Sequence
  Description of Artificial Sequence: Synthetic oligonucleotide
agauggaaguagauaaaaa

SEQ ID NO: 3073 - RNA, 19 nt, Artificial Sequence
  Description of Artificial Sequence: Synthetic oligonucleotide
aggcccucaggacacagac

SEQ ID NO: 3074 - RNA, 19 nt, Artificial Sequence
  Description of Artificial Sequence: Synthetic oligonucleotide
auggaaguagauaaaaaug

SEQ ID NO: 3075 - RNA, 19 nt, Artificial Sequence
  Description of Artificial Sequence: Synthetic oligonucleotide
cuguccccauaacuuugug

SEQ ID NO: 3076 - RNA, 19 nt, Artificial Sequence
  Description of Artificial Sequence: Synthetic oligonucleotide
cagguuaccugaacaucca

SEQ ID NO: 3077 - RNA, 19 nt, Artificial Sequence
  Description of Artificial Sequence: Synthetic oligonucleotide
cugaacauccaguccuggc

SEQ ID NO: 3078 - RNA, 19 nt, Artificial Sequence
  Description of Artificial Sequence: Synthetic oligonucleotide
gcccucaggacacagacug

SEQ ID NO: 3079 - RNA, 19 nt, Artificial Sequence
  Description of Artificial Sequence: Synthetic oligonucleotide
auucgagaagugacaggcu

SEQ ID NO: 3080 - RNA, 19 nt, Artificial Sequence
  Description of Artificial Sequence: Synthetic oligonucleotide
guuaccugaacauccaguc

SEQ ID NO: 3081 - RNA, 19 nt, Artificial Sequence
  Description of Artificial Sequence: Synthetic oligonucleotide
ugcucaggcccucaggaca

SEQ ID NO: 3082 - RNA, 19 nt, Artificial Sequence
  Description of Artificial Sequence: Synthetic oligonucleotide
cuucaaugacaguggagcc

SEQ ID NO: 3083 - RNA, 19 nt, Artificial Sequence
  Description of Artificial Sequence: Synthetic oligonucleotide
agugugccgggggcugcuc

SEQ ID NO: 3084 - RNA, 19 nt, Artificial Sequence
  Description of Artificial Sequence: Synthetic oligonucleotide
auaacccugauuacuggca

SEQ ID NO: 3085 - RNA, 19 nt, Artificial Sequence
  Description of Artificial Sequence: Synthetic oligonucleotide
gaucccugaaggaaauuag

SEQ ID NO: 3086 - RNA, 19 nt, Artificial Sequence
  Description of Artificial Sequence: Synthetic oligonucleotide
aguguaauggucacugcuu

SEQ ID NO: 3087 - RNA, 19 nt, Artificial Sequence
  Description of Artificial Sequence: Synthetic oligonucleotide
gugugccgggggcugcuca

SEQ ID NO: 3088 - RNA, 19 nt, Artificial Sequence
  Description of Artificial Sequence: Synthetic oligonucleotide
agaacugcacccaggggug

SEQ ID NO: 3089 - RNA, 19 nt, Artificial Sequence
  Description of Artificial Sequence: Synthetic oligonucleotide
cagagaagcucaaugucuu

SEQ ID NO: 3090 - RNA, 19 nt, Artificial Sequence
  Description of Artificial Sequence: Synthetic oligonucleotide
ccgaucccugaaggaaauu

SEQ ID NO: 3091 - RNA, 19 nt, Artificial Sequence
  Description of Artificial Sequence: Synthetic oligonucleotide
cccuggacccagagaagcu

SEQ ID NO: 3092 - RNA, 19 nt, Artificial Sequence
  Description of Artificial Sequence: Synthetic oligonucleotide
cccagagaagcucaauguc

SEQ ID NO: 3093 - RNA, 19 nt, Artificial Sequence
  Description of Artificial Sequence: Synthetic oligonucleotide
ccugaaggaaauuagugcu

SEQ ID NO: 3094 - RNA, 19 nt, Artificial Sequence
  Description of Artificial Sequence: Synthetic oligonucleotide
cuuggcucgggugucuuug

SEQ ID NO: 3095 - RNA, 19 nt, Artificial Sequence
  Description of Artificial Sequence: Synthetic oligonucleotide
gagugugccgggggcugcu

SEQ ID NO: 3096 - RNA, 19 nt, Artificial Sequence
  Description of Artificial Sequence: Synthetic oligonucleotide
gacccagagaagcucaaug

SEQ ID NO: 3097 - RNA, 19 nt, Artificial Sequence
  Description of Artificial Sequence: Synthetic oligonucleotide
gcccuggacccagagaagc

SEQ ID NO: 3098 - RNA, 19 nt, Artificial Sequence
  Description of Artificial Sequence: Synthetic oligonucleotide
gccuuugauaacccugauu

SEQ ID NO: 3099 - RNA, 19 nt, Artificial Sequence
  Description of Artificial Sequence: Synthetic oligonucleotide
gcucgggugucuuuggaac

SEQ ID NO: 3100 - RNA, 19 nt, Artificial Sequence
  Description of Artificial Sequence: Synthetic oligonucleotide
ggcucgggugucuuuggaa

SEQ ID NO: 3101 - RNA, 19 nt, Artificial Sequence
  Description of Artificial Sequence: Synthetic oligonucleotide
aucccugaaggaaauuagu

SEQ ID NO: 3102 - RNA, 19 nt, Artificial Sequence
  Description of Artificial Sequence: Synthetic oligonucleotide
cuuugauaacccugauuac

SEQ ID NO: 3103 - RNA, 19 nt, Artificial Sequence
  Description of Artificial Sequence: Synthetic oligonucleotide
ucaguguuuuuuccaauuu

SEQ ID NO: 3104 - RNA, 19 nt, Artificial Sequence
  Description of Artificial Sequence: Synthetic oligonucleotide
uggcucgggugucuuugga

SEQ ID NO: 3105 - RNA, 19 nt, Artificial Sequence
  Description of Artificial Sequence: Synthetic oligonucleotide
ucccucaaggagauaagug

SEQ ID NO: 3106 - RNA, 19 nt, Artificial Sequence
  Description of Artificial Sequence: Synthetic oligonucleotide
ccucagccacccauaugua

SEQ ID NO: 3107 - RNA, 19 nt, Artificial Sequence
  Description of Artificial Sequence: Synthetic oligonucleotide
acuuuuuuuguuuuguuuu

SEQ ID NO: 3108 - RNA, 19 nt, Artificial Sequence
  Description of Artificial Sequence: Synthetic oligonucleotide
aaaugggcucaagaugugu

SEQ ID NO: 3109 - RNA, 19 nt, Artificial Sequence
  Description of Artificial Sequence: Synthetic oligonucleotide
aauuaaguggauggcccuu

SEQ ID NO: 3110 - RNA, 19 nt, Artificial Sequence
  Description of Artificial Sequence: Synthetic oligonucleotide
acauccaguccuggccgcc

SEQ ID NO: 3111 - RNA, 19 nt, Artificial Sequence
  Description of Artificial Sequence: Synthetic oligonucleotide
acccagggguguaaaggac

SEQ ID NO: 3112 - RNA, 19 nt, Artificial Sequence
  Description of Artificial Sequence: Synthetic oligonucleotide
gggcugcucaggcccucag

SEQ ID NO: 3113 - RNA, 19 nt, Artificial Sequence
  Description of Artificial Sequence: Synthetic oligonucleotide
guguuggaugauugaugag

SEQ ID NO: 3114 - RNA, 19 nt, Artificial Sequence
  Description of Artificial Sequence: Synthetic oligonucleotide
cucaaugucuuccggacag

SEQ ID NO: 3115 - RNA, 19 nt, Artificial Sequence
  Description of Artificial Sequence: Synthetic oligonucleotide
cugucucuacuaaaaauac

SEQ ID NO: 3116 - RNA, 19 nt, Artificial Sequence
  Description of Artificial Sequence: Synthetic oligonucleotide
ggggcugcucaggcccuca

SEQ ID NO: 3117 - RNA, 19 nt, Artificial Sequence
  Description of Artificial Sequence: Synthetic oligonucleotide
gccaugagaacugcaccca

SEQ ID NO: 3118 - RNA, 19 nt, Artificial Sequence
  Description of Artificial Sequence: Synthetic oligonucleotide
gccgggggcugcucaggcc

SEQ ID NO: 3119 - RNA, 19 nt, Artificial Sequence
  Description of Artificial Sequence: Synthetic oligonucleotide
cuuccgaucccugaaggaa

SEQ ID NO: 3120 - RNA, 19 nt, Artificial Sequence
  Description of Artificial Sequence: Synthetic oligonucleotide
ucacuuaguccuuuaucau

SEQ ID NO: 3121 - RNA, 19 nt, Artificial Sequence
  Description of Artificial Sequence: Synthetic oligonucleotide
ucaaugucuuccggacagu

SEQ ID NO: 3122 - RNA, 19 nt, Artificial Sequence
  Description of Artificial Sequence: Synthetic oligonucleotide
cuccaauuaaguggauggc

SEQ ID NO: 3123 - RNA, 19 nt, Artificial Sequence
  Description of Artificial Sequence: Synthetic oligonucleotide
ugccaugagaacugcaccc

SEQ ID NO: 3124 - RNA, 19 nt, Artificial Sequence
  Description of Artificial Sequence: Synthetic oligonucleotide
cgggggcugcucaggcccu

SEQ ID NO: 3125 - RNA, 19 nt, Artificial Sequence
  Description of Artificial Sequence: Synthetic oligonucleotide
ccguggagaaccccgagua

SEQ ID NO: 3126 - RNA, 19 nt, Artificial Sequence
  Description of Artificial Sequence: Synthetic oligonucleotide
gagaaugugaaaauuccag

SEQ ID NO: 3127 - RNA, 19 nt, Artificial Sequence
  Description of Artificial Sequence: Synthetic oligonucleotide
gccguggagaaccccgagu

SEQ ID NO: 3128 - RNA, 19 nt, Artificial Sequence
  Description of Artificial Sequence: Synthetic oligonucleotide
caucugccucaccuccacc

SEQ ID NO: 3129 - RNA, 19 nt, Artificial Sequence
  Description of Artificial Sequence: Synthetic oligonucleotide
cgaauucuccaaaauggcc

SEQ ID NO: 3130 - RNA, 19 nt, Artificial Sequence
  Description of Artificial Sequence: Synthetic oligonucleotide
ucugccucaccuccaccgu

SEQ ID NO: 3131 - RNA, 19 nt, Artificial Sequence
  Description of Artificial Sequence: Synthetic oligonucleotide
uucuuuuuuuuuuuuuuuu

SEQ ID NO: 3132 - RNA, 19 nt, Artificial Sequence
  Description of Artificial Sequence: Synthetic oligonucleotide
uccuccugccuacaccccc

SEQ ID NO: 3133 - RNA, 19 nt, Artificial Sequence
  Description of Artificial Sequence: Synthetic oligonucleotide
uuuuuuuuuuuuuuaaagc

SEQ ID NO: 3134 - RNA, 19 nt, Artificial Sequence
  Description of Artificial Sequence: Synthetic oligonucleotide
uuuuuuuuuuuaaagcaga

SEQ ID NO: 3135 - RNA, 19 nt, Artificial Sequence
  Description of Artificial Sequence: Synthetic oligonucleotide
uuuuuuuuuuuuaaagcag

SEQ ID NO: 3136 - RNA, 19 nt, Artificial Sequence
  Description of Artificial Sequence: Synthetic oligonucleotide
aaaaaaaaaaaaaaaaaaa

SEQ ID NO: 3137 - RNA, 19 nt, Artificial Sequence
  Description of Artificial Sequence: Synthetic oligonucleotide
uaaaaaaaaaaaaaaaaaa

SEQ ID NO: 3138 - RNA, 19 nt, Artificial Sequence
  Description of Artificial Sequence: Synthetic oligonucleotide
aagaugaugaggaugaaaa

SEQ ID NO: 3139 - RNA, 19 nt, Artificial Sequence
  Description of Artificial Sequence: Synthetic oligonucleotide
gaagaugaugaggaugaaa

SEQ ID NO: 3140 - RNA, 19 nt, Artificial Sequence
  Description of Artificial Sequence: Synthetic oligonucleotide
auguuuuagaaggaaaaaa

SEQ ID NO: 3141 - RNA, 19 nt, Artificial Sequence
  Description of Artificial Sequence: Synthetic oligonucleotide
gugaaugaacaaaugaaua

SEQ ID NO: 3142 - RNA, 19 nt, Artificial Sequence
  Description of Artificial Sequence: Synthetic oligonucleotide
aaauacacacaccagagug

SEQ ID NO: 3143 - RNA, 19 nt, Artificial Sequence
  Description of Artificial Sequence: Synthetic oligonucleotide
aaguagauaaaaaugggcu

SEQ ID NO: 3144 - RNA, 19 nt, Artificial Sequence
  Description of Artificial Sequence: Synthetic oligonucleotide
aauacacacaccagaguga

SEQ ID NO: 3145 - RNA, 19 nt, Artificial Sequence
  Description of Artificial Sequence: Synthetic oligonucleotide
agacuguggacucgagcaa

SEQ ID NO: 3146 - RNA, 19 nt, Artificial Sequence
  Description of Artificial Sequence: Synthetic oligonucleotide
aguggagccuguguaccuc

SEQ ID NO: 3147 - RNA, 19 nt, Artificial Sequence
  Description of Artificial Sequence: Synthetic oligonucleotide
caguggagccuguguaccu

SEQ ID NO: 3148 - RNA, 19 nt, Artificial Sequence
  Description of Artificial Sequence: Synthetic oligonucleotide
acaagauggaaguagauaa

SEQ ID NO: 3149 - RNA, 19 nt, Artificial Sequence
  Description of Artificial Sequence: Synthetic oligonucleotide
ccucuccuuccugcagugg

SEQ ID NO: 3150 - RNA, 19 nt, Artificial Sequence
  Description of Artificial Sequence: Synthetic oligonucleotide
cucaggcaguguguccugg

SEQ ID NO: 3151 - RNA, 19 nt, Artificial Sequence
  Description of Artificial Sequence: Synthetic oligonucleotide
acaacuucaguguuuuuuc

SEQ ID NO: 3152 - RNA, 19 nt, Artificial Sequence
  Description of Artificial Sequence: Synthetic oligonucleotide
cuguggacucgagcaacau

SEQ ID NO: 3153 - RNA, 19 nt, Artificial Sequence
  Description of Artificial Sequence: Synthetic oligonucleotide
gagguggugauggggaacc

SEQ ID NO: 3154 - RNA, 19 nt, Artificial Sequence
  Description of Artificial Sequence: Synthetic oligonucleotide
gugauggggaaccuugaga

SEQ ID NO: 3155 - RNA, 19 nt, Artificial Sequence
  Description of Artificial Sequence: Synthetic oligonucleotide
guggacucgagcaacauug

SEQ ID NO: 3156 - RNA, 19 nt, Artificial Sequence
  Description of Artificial Sequence: Synthetic oligonucleotide
cugacaagauggaaguaga

SEQ ID NO: 3157 - RNA, 19 nt, Artificial Sequence
  Description of Artificial Sequence: Synthetic oligonucleotide
ucucaggcaguguguccug

SEQ ID NO: 3158 - RNA, 19 nt, Artificial Sequence
  Description of Artificial Sequence: Synthetic oligonucleotide
ggcacuucaaugacagugg

SEQ ID NO: 3159 - RNA, 19 nt, Artificial Sequence
  Description of Artificial Sequence: Synthetic oligonucleotide
ugagguggugauggggaac

SEQ ID NO: 3160 - RNA, 19 nt, Artificial Sequence
  Description of Artificial Sequence: Synthetic oligonucleotide
uggaugauugaugagaaca

SEQ ID NO: 3161 - RNA, 19 nt, Artificial Sequence
  Description of Artificial Sequence: Synthetic oligonucleotide
ugacaagauggaaguagau

SEQ ID NO: 3162 - RNA, 19 nt, Artificial Sequence
  Description of Artificial Sequence: Synthetic oligonucleotide
uuggaugauugaugagaac

SEQ ID NO: 3163 - RNA, 19 nt, Artificial Sequence
  Description of Artificial Sequence: Synthetic oligonucleotide
uuaccugaacauccagucc

SEQ ID NO: 3164 - RNA, 19 nt, Artificial Sequence
  Description of Artificial Sequence: Synthetic oligonucleotide
ucuucucccuauucccucu

1-41. (canceled)

42. A meroduplex ribonucleic acid (mdRNA) molecule that down regulates the expression of any one of a human ERBB family mRNA, the mdRNA molecule comprising a first strand of 15 to 40 nucleotides in length that is complementary to a nucleic acid sequence as set forth in SEQ ID NO:1158, 1159, 1160, or 1161 and is fully complementary with up to three mismatches to at least one nucleic acid sequence selected from SEQ ID NO:1162, 1163, 1164, 1165, or 1166, and a second strand and a third strand that is each complementary to non-overlapping regions of the first strand, wherein the second strand and third strand can anneal with the first strand to form at least two double-stranded regions spaced apart by a nick or a gap.

43. The mdRNA molecule of claim 42 wherein the first strand is 15 to 25 nucleotides in length or 26 to 40 nucleotides in length.

44. The mdRNA molecule of claim 42 wherein the gap comprises from 1 to 10 unpaired nucleotides.

45. The mdRNA molecule of claim 42 wherein the double-stranded regions have a combined length of about 15 base pairs to about 40 base pairs.

46. The mdRNA molecule of claim 42 wherein the mdRNA molecule comprises at least one 5-methyluridine, 2-thioribothymidine, or 2′-O-methyl-5-methyluridine.

47. The mdRNA molecule of claim 42 wherein the mdRNA molecule comprises at least one locked nucleic acid (LNA) molecule, deoxy nucleotide, G clamp, 2′-sugar modification, modified internucleoside linkage, or any combination thereof.

48. The mdRNA molecule of claim 42 wherein the mdRNA contains an overhang of one to four nucleotides on at least one 3′-end that is not part of the gap or has a blunt end at one or both ends of the mdRNA.

49. The mdRNA molecule of claim 42 wherein at least one pyrimidine of the mdRNA molecule is a pyrimidine nucleoside according to Formula I or II: [chemical structure]
wherein:
R¹ and R² are each independently a —H, —OH, —OCH₃, —OCH₂OCH₂CH₃, —OCH₂CH₂OCH₃, halogen, substituted or unsubstituted C₁-C₁₀ alkyl, alkoxy, alkoxyalkyl, hydroxyalkyl, carboxyalkyl, alkylsulfonylamino, aminoalkyl, dialkylamino, alkylaminoalkyl, dialkylaminoalkyl, haloalkyl, trifluoromethyl, cycloalkyl, (cycloalkyl)alkyl, substituted or unsubstituted C₂-C₁₀ alkenyl, substituted or unsubstituted —O-allyl, —O—CH₂CH═CH₂, —O—CH═CHCH₃, substituted or unsubstituted C₂-C₁₀ alkynyl, carbamoyl, carbamyl, carboxy, carbonylamino, substituted or unsubstituted aryl, substituted or unsubstituted aralkyl, —NH₂, —NO₂, —C≡, or heterocyclo group,
R³ and R⁴ are each independently a hydroxyl, a protected hydroxyl, a phosphate, or an internucleoside linking group, and
R⁵ and R⁸ are each independently O or S.

50. The mdRNA molecule of claim 49 wherein at least one nucleoside is according to Formula I and in which R¹ is methyl and R² is —OH or —O-methyl.

51. The mdRNA molecule of claim 49 wherein at least one R² is selected from the group consisting of 2′-O-(C₁-C₅) alkyl, 2′-O-methyl, 2′-OCH₂OCH₂CH₃, 2′-OCH₂CH₂OCH₃, 2′-O-allyl, and fluoro.

52. The mdRNA molecule of claim 42 wherein the first strand is complementary to in any one of SEQ ID NOS:1158, 1162, and 1163, or SEQ ID NOS:1158, 1162, 1163, and 1164, or SEQ ID NOS:1158, 1162, 1163, 1164, and 1166, or SEQ ID NOS:77-79, or SEQ ID NOS:1162, 1163, and 1166, or SEQ ID NOS:1164 and 1166, or SEQ ID NOS:1158 and 1164, or SEQ ID NOS:1158 and 1166, or SEQ ID NOS:1158-1166.

53. The mdRNA molecule of claim 42 wherein the first strand is 19 to 23 nucleotides in length and complementary to a human ERBB family nucleic acid sequence as set forth in any one of SEQ ID NOS:1167-3164.

54. The mdRNA molecule of claim 42 wherein the first strand is 25 to 29 nucleotides in length and complementary to a human ERBB family nucleic acid sequence as set forth in any one of SEQ ID NOS:1162-3164.

55. A method for reducing the expression of one or more human ERBB family genes, comprising administering an mdRNA molecule of claim 42 to a cell expressing a human ERBB family gene, wherein the mdRNA molecule reduces the expression of the one or more human ERBB family genes in the cell.

56. The method according to claim 55 wherein the cell is a human cell.

57. A double-stranded ribonucleic acid (dsRNA) molecule that down regulates the expression of any one of a human ERBB family mRNA, the mdRNA molecule comprising a first strand of 15 to 40 nucleotides in length that is complementary to a nucleic acid sequence as set forth in SEQ ID NO:1158, 1159, 1160, or 1161 and is fully complementary with up to three mismatches to at least one nucleic acid sequence selected from SEQ ID NO:1162, 1163, 1164, 1165, or 1166, and a second strand that is complementary to the first strand.

58. The dsRNA molecule of claim 57 wherein the first strand is from 15 to 25 nucleotides in length or 26 to 40 nucleotides in length.

59. The dsRNA molecule of claim 57 wherein the dsRNA molecule has a blunt end at one or both ends of the dsRNA.

60. The dsRNA molecule of claim 57 wherein the dsRNA molecule has a 3′-end overhang of one to four nucleotides at one or both ends of the dsRNA.

61. The dsRNA molecule of claim 57 wherein the dsRNA molecule comprises at least one 5-methyluridine, 2-thioribothymidine, or 2′-O-methyl-5-methyluridine.

62. The dsRNA molecule of claim 57 wherein the dsRNA molecule comprises at least one locked nucleic acid (LNA) molecule, deoxy nucleotide, G clamp, 2′-sugar modification, modified internucleoside linkage, or any combination thereof.

63. The dsRNA molecule of claim 57 wherein the dsRNA molecule has a 5′-terminal end comprising a hydroxyl or a phosphate.

64. The dsRNA molecule of claim 57 wherein at least one pyrimidine of the dsRNA molecule comprises a pyrimidine nucleoside according to Formula I or II: [chemical structure]
wherein:
R¹ and R² are each independently a —H, —OH, —OCH₃, —OCH₂OCH₂CH₃, —OCH₂CH₂OCH₃, halogen, substituted or unsubstituted C₁-C₁₀ alkyl, alkoxy, alkoxyalkyl, hydroxyalkyl, carboxyalkyl, alkylsulfonylamino, aminoalkyl, dialkylamino, alkylaminoalkyl, dialkylaminoalkyl, haloalkyl, trifluoromethyl, cycloalkyl, (cycloalkyl)alkyl, substituted or unsubstituted C₂-C₁₀ alkenyl, substituted or unsubstituted —O-allyl, —O—CH₂CH═CH₂, —O—CH═CHCH₃, substituted or unsubstituted C₂-C₁₀ alkynyl, carbamoyl, carbamyl, carboxy, carbonylamino, substituted or unsubstituted aryl, substituted or unsubstituted aralkyl, —NH₂, —NO₂, —C≡N, or heterocyclo group,
R³ and R⁴ are each independently a hydroxyl, a protected hydroxyl, a phosphate, or an internucleoside linking group, and
R⁵ and R⁸ are each independently O or S.

65. The dsRNA molecule of claim 64 wherein at least one nucleoside is according to Formula I and in which R¹ is methyl and R² is —OH or —O-methyl.

66. The dsRNA molecule of claim 64 wherein at least one R² is selected from the group consisting of 2′-O-(C₁-C₅) alkyl, 2′-O-methyl, 2′-OCH₂OCH₂CH₃, 2′-OCH₂CH₂OCH₃, 2′-O-allyl, and 2′-fluoro.

67. A method for reducing the expression of a one or more human VEGF family genes, comprising administering a dsRNA molecule of claim 57 to a cell expressing a human VEGF family gene, wherein the dsRNA molecule reduces the expression of the one or more human VEGF family genes in the cell.

68. The method according to claim 67 wherein the cell is a human cell.

69. The dsRNA molecule of claim 57 wherein the first strand is complementary to in any one of SEQ ID NOS:1158, 1162, and 1163, or SEQ ID NOS:1158, 1162, 1163, and 1164, or SEQ ID NOS:1158, 1162, 1163, 1164, and 1166, or SEQ ID NOS:77-79, or SEQ ID NOS:1162, 1163, and 1166, or SEQ ID NOS:1164 and 1166, or SEQ ID NOS:1158 and 1164, or SEQ ID NOS:1158 and 1166, or SEQ ID NOS:1158-1166.

70. The dsRNA molecule of claim 57 wherein the first strand is 19 to 23 nucleotides in length and complementary to a human ERBB family nucleic acid sequence as set forth in any one of SEQ ID NOS:1167-3164.

71. The dsRNA molecule of claim 57 wherein the first strand is 25 to 29 nucleotides in length and complementary to a human ERBB family nucleic acid sequence as set forth in any one of SEQ ID NOS:1162-3164.
